United States Patent Application Publication US 2026/0265781 A1, published September 10, 2026 (application 18/724,562).

The application's sequence listing, which the Patent Office published only in electronic form, follows.

SEQUENCE LISTING (120 sequences)

SEQ ID NO: 1 - DNA, 34 bp, synthetic construct
  source 1..34: mol_type = other DNA; note = LoxP site
ataacttcgtatagcatacattatacgaagttat

SEQ ID NO: 2 - DNA, 34 bp, synthetic construct
  source 1..34: mol_type = other DNA; note = Mutant LoxP
ataacttcgtatannntannntatacgaagttat

SEQ ID NO: 3 - DNA, 34 bp, synthetic construct
  source 1..34: mol_type = other DNA; note = Lox 511 site
ataacttcgtataatgtatactatacgaagttat

SEQ ID NO: 4 - DNA, 34 bp, synthetic construct
  source 1..34: mol_type = other DNA; note = Lox 5171
ataacttcgtataatgtgtactatacgaagttat

SEQ ID NO: 5 - DNA, 34 bp, synthetic construct
  source 1..34: mol_type = other DNA; note = Lox 2272
ataacttcgtataaagtatcctatacgaagttat

SEQ ID NO: 6 - DNA, 34 bp, synthetic construct
  source 1..34: mol_type = other DNA; note = Lox M2
ataacttcgtataagaaaccatatacgaagttat

SEQ ID NO: 7 - DNA, 34 bp, synthetic construct
  source 1..34: mol_type = other DNA; note = Lox M3
ataacttcgtatataataccatatacgaagttat

SEQ ID NO: 8 - DNA, 34 bp, synthetic construct
  source 1..34: mol_type = other DNA; note = Lox M7
ataacttcgtataagatagaatatacgaagttat

SEQ ID NO: 9 - DNA, 34 bp, synthetic construct
  source 1..34: mol_type = other DNA; note = Lox M11
ataacttcgtatacgataccatatacgaagttat

SEQ ID NO: 10 - DNA, 34 bp, synthetic construct
  source 1..34: mol_type = other DNA; note = Lox 71
taccgttcgtatannntannntatacgaagttat

SEQ ID NO: 11 - DNA, 34 bp, synthetic construct
  source 1..34: mol_type = other DNA; note = Lox 66
ataacttcgtatannntannntatacgaacggta

SEQ ID NO: 12 - DNA, 34 bp, synthetic construct
  source 1..34: mol_type = other DNA; note = Flippase recognition target (FTR)
gaagttcctattctctagaaagtataggaacttc

SEQ ID NO: 13 - DNA, 13 bp, synthetic construct
  source 1..13: mol_type = other DNA; note = Site specific reverse orientination Flippase binding region
gaagttcctattc

SEQ ID NO: 14 - DNA, 238 bp, synthetic construct
  source 1..238: mol_type = other DNA; note = Hot spot 1 - landing pad plasmid subsequence
taagaaaccattattatcatgacattaacctataaaaataggcgtatcacgaggccctgatggctctttgcggcacccatcgttcgtaatgttccgtggcaccgaggacaaccctcaagagaaaatgtaatcacactggctcaccttcgggtgggcctttctgcgtttataaggagacactttatgtttaagaaggttggtaaattccttgcggctttggcagccaagctagatccgg

SEQ ID NO: 15 - DNA, 281 bp, synthetic construct
  source 1..281: mol_type = other DNA; note = Hot spot 1 - landing pad plasmid subsequence
ctctacgccggacgcatcgtggccggcatcaccggcgccacaggtgcggttgctggcgcctatatcgccgacatcaccgatggggaagatcgggctcgccacttcgggctcatgagcgcttgtttcggcgtgggtatggtggcaggccccgtggccgggggactgttgggcgccatctccttgcatgcaccattccttgcggcggcggtgctcaacggcctcaacctactactgggctgcttcctaatgcaggagtcgcataagggagagcgtcgacctcg

SEQ ID NO: 16 - DNA, 399 bp, synthetic construct
  source 1..399: mol_type = other DNA; note = Hot spot 1 - 5' homologous recombination polynucleotide sequence (5' junction)
tgctcttgcccggcgtcaatacgggataataccgcgccacatagcagaactttaaaagtgctcatcattggaaaacgttcttcggggcgaaaactctcaaggatcttaccgctgttgagatccagttcgatgtaacccactcgtgcacccaactgatcttcagcatcttttactttcaccagcgtttctgggtgagcaaaaacaggaaggcaaaatgccgcaaaaaagggaataagggcgacacggaaatgttgaatactcatactcttcctttttcaatattattgaagcatttatcagggttattgtctcatgagcggatacatatttgaatgtatttagaaaaataaacaaataggggttccgcgcacatttccccgaaaagtgccacctgacgtc

SEQ ID NO: 17 - DNA, 1217 bp, synthetic construct
  source 1..1217: mol_type = other DNA; note = Hot spot 1 - 3' homologous recombination polynucleotide sequence (3' junction)
cgggccgcgttgctggcgtttttccataggctccgcccccctgacgagcatcacaaaaatcgacgctcaagtcagaggtggcgaaacccgacaggactataaagataccaggcgtttccccctggaagctccctcgtgcgctctcctgttccgaccctgccgcttaccggatacctgtccgcctttctcccttcgggaagcgtggcgctttctcatagctcacgctgtaggtatctcagttcggtgtaggtcgttcgctccaagctgggctgtgtgcacgaaccccccgttcagcccgaccgctgcgccttatccggtaactatcgtcttgagtccaacccggtaagacacgacttatcgccactggcagcagccactggtaacaggattagcagagcgaggtatgtaggcggtgctacagagttcttgaagtggtggcctaactacggctacactagaagaacagtatttggtatctgcgctctgctgaagccagttaccttcggaaaaagagttggtagctcttgatccggcaaacaaaccaccgctggtagcggtggtttttttgtttgcaagcagcagattacgcgcagaaaaaaaggatctcaagaagatcctttgatcttttctacggggtctgacgctcagtggaacgaaaactcacgttaagggattttggtcatgagattatcaaaaaggatcttcacctagatccttttaaattaaaaatgaagttttaaatcaatctaaagtatatatgagtaaacttggtctgacagttaccaatgcttaatcagtgaggcacctatctcagcgatctgtctatttcgttcatccatagttgcctgactccccgtcgtgtagataactacgatacgggagggcttaccatctggccccagtgctgcaatgataccgcgagacccacgctcaccggctccagatttatcagcaataaaccagccagccggaagggccgagcgcagaagtggtcctgcaactttatccgcctccatccagtctattaattgttgccgggaagctagagtaagtagttcgccagttaatagtttgcgcaacgttgttgccattgctacaggcatcgtggtgtcacgctcgtcgtttggtatggcttcattcagctccggttcccaacgatcaaggcgagttacatgatcccccatgttgtgcaaaaaagcggttagctccttcggtcc

SEQ ID NO: 18 - DNA, 508 bp, synthetic construct
  source 1..508: mol_type = other DNA; note = Hot spot 1 - 5' homologous recombination polynucleotide sequence (5' junction)
cgtttgtgtatattttctaccagtttttcctaaaaaggcctcgatttaaaagcaacttatgatactctatgagacaatagttacaatggagaactgcaaataagtttgggaacatgcaaaagtgaaatggggtatgtttattagacagggagaattcttatgaatggagcatataataattacgatcgttttccctatgtacaggggacatgttctaagagcccccactgagtgcttgaacttgctgctgaatcagaagaaacaagagaaaagtataagagaacaagggaattcagggtcataagaggatagctatcagttacagagtgtgtgaacaaagcattttaagcacattatcacttagtcacataacagtctggaaagaagtttctattatcttattttaggtataaggaaactaaaatctccaacagttgagtaatatgccccagttcccaagtgataatttgcattgccgtttccgattcaattctgtctgaccacaaac

SEQ ID NO: 19 - DNA, 298 bp, synthetic construct
  source 1..298: mol_type = other DNA; note = Hot spot 1 - 3' homologous recombination polynucleotide sequence (3' junction)
acgcctatgtctcttgtgacagaagcacaaggtgggggtgggtgggtatgtagaactcactattggggcctctgacaatggaatctctgaagacactgtaacacttgtatgtagaccttttatacttgggaggtaattcgaataaagaaagtaaaatttaagatatgaacatgcagggaacacttattgaataccatagacttgctgaacgggaggggaacttgtccgagacaactggtgttcatagagcacagaatgaagacacattcacccacagcagctcagtggtcctaacatc

SEQ ID NO: 20 - DNA, 40020 bp, synthetic construct
  source 1..40020: mol_type = other DNA; note = Hot spot 1 - subsequence of Chromosome 3 of Cricetulus griseus
tttagtctgggttctctcctgccaggatggtcacaattcatgtttttacacctaaaccttgagggatttgtcttgaaatttgcctgtgtctgaaacaaatattacaaaagaacttcagttagtgtgagaaaaccatatgtaagaacaatttctccatcacctttgactttaggtaattttggaaggaaacaagtgagagagagtatattagtatgaagcagaagttgaccttgaacctaccctgctcctgctttaacctccaatgctacaattataggcaagtactcctatgtccagtatgacttggttctgattctgacaactatcttgcttgtctttgtgcagttttatctacagaaatgtggtagtttaaatgagaaatgtccccattaacagatcatgatggcaagtctttaatcccagcacttggaaggcagaggcaagcaaatctctgtgactttgaggtcagcctggtctacatagggattttcaggacagctagggctatataaagagatcttgtcccaaaataagcaaaaaaaaaaaaaaaaaaagttaagagggaggaagggaaggagggagggaggaaggggagggagggcccacaggctagtatgtttgaatacttggtcctcagttgatggtgctgctctgggaggttatagaacatttaggatgaggagccttatgaagtacatcactttgggcaggatttaagagtttacagcctcacttccagactgcacactctgctttctatgtagttatcttcactctgctttccgtgtgcaaagctgttacactcgtcttcccgctctcactgatatcccatcattatggactctccctctagaaaaaaaatccaaaataaactcttcattctctagaaaacttgtgttgggggtgtttatcccatcagtagaaaggcaactagcacaagacacagctctctctgtaaatgttatctgttgacatttgcagaagctttaacttaaagagcccaaacagcatctttcttgagctgctaggacacttagagtacagagagtattaaatttaaaaaatggactacgaggaggtctgacttaaaagtcactcatttgtaatcttttagtttcttaaaattggttgcaaagtgttccgtttgtactaactcactgacatctgtcacatacagctccaatgtgggctcaggtctcatctcagcaatgagggattgttgagaccaaatcacagatggctattcagtctcaggttagtccacgaagatcatggtggggagcatggcacaggggatgaggagcaggaaagggagagggagactagaggcctggccggggcttttgaaacctcaaagtctaccccaagagacacacttccttcagcaaggtcacacatcctaatctttcccaaacagttctactaactggagaccaagcattcaaacgtgagtctacggaggtcattcttacccaaaccaccacaatatttatacccttgacaaagaaaaacaggtgaaatcttaattgtcaatccccttttaagagtgtccccatccctcacactaggataagaaaagttgatgactttatcttccggtattggcatagcctctgtggtttataggcaccctaggaatccgtggcacagaatctagttggagaaacaagcatggctctaaaactgtccactgacttttagatgaatactcccaatgtcatagctgttactgagccatgcggagggaaatcccctgactggagctcacaacagtaactttcttggcttttgtgaatttatataaaaactagttactacacaagtttattcagtaaaggaccctaaattgtcagttaagataagtgatgattaatcttgctaaactgatggcatttggaatactgtggcagtccaaatgatacatctaccacaggcccaggcatttgaacacttggcccccagctggtgaagctttttagggaagtttaaaagatgtggtcttgctggagaaagtgtctcactgggaatgggctttgagagaatatggtctcaccccacttccagtttgctctctctgcttcatggttgcagttaatgtgtgatctctcagctttttgcctctgcttgttgtctccttgtcaagacagactctttaacatatctttattcctgtcaggatggttctattttcttacttacagaaacatcagaaatgatttttaaagacaagcaacaacaatagtgaaaggaggcaatggttattggcctaataccaacttgtgcctctggctctgtgctgtctccttcacctttctgttttagtcaccttggatctaagaacaacaggactgatagataaacatctttgtgacaggagactccacccccaaagaactggtgagcctgaagactacacacacacacacacacacacacacacacacacacacacacacacaccctgcatgcacacggaggcaattatccatgagggtgaagccacatgcacaaacaaaaaacaagcagatatattcatcttaggagagccaaatgttcccctctggtggtgataacgttagcttctttgggatcaccttagggcaccaaaactgagacagtgatcaaccacaccatacattgaccagaactgcttaattatgcctactcctcatgcctccattgttctctacttaaatttaaagatcttcgtcagtatccagggtcacagggtttcctcctttgttctttcatccagtgggtcctcattaaataaatctcttcttggtgcctttcaccattagtcatctctttaatttgtatactgggattgtctagcctagcttgttgagatggcaggagcagtaacactggctctgaaaacactagtaataactttaggaacagagagggagaaaaagccctcacggcgtcagtcagaaaagaagagaatggtctcgtgtggctgctagaaacagttttcttcccaggacacttttagatctttccactttgactagcatttgctgtattccatcacttcttggtgaagcagagaaaaatgtttacattcccatggggaaattcccttcaagggaaactctctgatatgtaatttttccatgttggccttcttcttatttctccttgtttgagctctgagacaaatctgagtttgtgccatatgccattgaccgaaaattccaaaattttgtagctggattcttgttactttgttgtttgaattttttgagaccattctggacttaagtagcttttaaagcacacacacacacaagtaaacagaaaattaaaaaaacaaacaggtaaactggaagtgtaactgtggtctgcttttttatatatctttattatctgaacttgaaggctgtttaggcttaagccatctggttttagataggaaaagttaaaattctataagagcaacagtaagaagcaagatgtatataaggagtcaatggtttgggagagacctccattataatttgtgtgtcatgagaaaaattaattctgtgctatcaggaagccccttgggaagaattctagaggactgatccaagtcctgctacaaagccatggataggagaaatgaaacagacctcattttaaattatatttaaggttcattccatgagatggaacctaatactgacatcgtaaataaggccaagagcatgcagcaagataggccctacaatgggaaaacctattattctacttaaaagacatagcaataaacaactcctaatgacatattgctatatctgtagatgagtcagtacgtggctcaacactcaccaaagaagctcctgcagtagatggcagttaacaaagaaacccacaaatggcctatgttgcagagaatgagggtctttgggatgctcggctctaaagaggatgtctatatcacacccctcccctcatacctcggggatttacattggaaaacagggtagaaagactgcagcgccagaagtggtggataactgcaaggaaacagtttccctgacacaacagggtagctgcacatacaaatgaacagaggctgagagagtgtgacagcacgcacaagatctgtgcaagctcaagccagacaaaaccctgtggggggaaagaggaggtggacctgatatctagtaatgaaattggccaggacactcactctacagagcctaatcctacagtatctgaatcagaggaggctaaatggctcacctacctaaaggatgcttttgtttgctttctgattaaaaacaagtcacattcaagtttgcctttggatgaacagactctagtcaaaaggcactcctcagtactgttgggcagtattccctgcattcaaaatctcaccatggcctttgtgggatattgactacagatctcagaatgttgcagttaaatcggtctcgtttctgagtttttcccagaaagcatcactcaagtccttagtcaccttactgaatgagggaatctgttgtcctcttctaagatgcaaatctacaaggaacaaattgtttacctggggtcccagttatgaaatatcaacaagacctaatggataaccaggaaaaaacaatgactgttgctaaagttaagttcccctaggacacaaccaattgaggagttcttggggatggttagctagtagagcatgaggatataaaataaatatttatagctcttcttgggatggatcttgagcccttaactcagccaatagagtagaaaattgcttttaacctttcaaagaccagctggaatctgtactcactttgagactgtctaacttaacaaaaccatttaaactttatgtctaatagtattaataagcaatttgggtgcaagttcttgtttaggtttctagctcacttctcaaaacattttgatcacatagaccaaggttgaccttcttatttctagtgcatagctgaaggatggcctccttatctctagacaatagcatcccattgttatgtgctagaacaaatcgaaagatagttgggctatttattgctgggtatacaccattctggatatagctttactggaaaagaagggaaagactaacactggctaactgctagcaggctgaaaggtatcttgtcagataactctaatgtgacctatcagacaatatcaactttaaatctagccactctgctgcccaaaaagcaggagctagtagccaagcatcaaaactgcaaagttgttgattctgtattcatgggcaatcaaacttgatgagccagctatcaagtcagatacatgggggaactctttagagatggaaggactttctgggtcacagaggatgtcatgctagacatgcaatataactttccaagaagtcatggctcagatcaccacacagaagatacatattttcaaagggctgaattaaaagttcttaccagggcctctaaaactttcatcacagaaaagtcttcacatatgttatgactccaaatacacattttgattgcccatgcccaaagatctatatgaagagagaggagatttctgatctctaataataaagagataaatcattttcaggttacataaaacccctctagagtctgtcctcgcgccaaaagaagtggttctcatactctgtctctgtcatcaaaagggaaactgtcacagcccaagctattgccagctattgaccaggactgtgatttcagtgcccctagtacttaaataaacttgatttcgactttcctgagtcttcaaaggcagacatggagacaagaggatggagtttcaaagaacaggactgccttctcactggaagatgaactctcattgagttgtcttgcttcatgaaaagtttgtttgctgtagctaactgtagtcaccaaggctctcattatgggaaagacacattcactgaatttttaggtcacagctcagctggtcatcattaagtgaggtaactcagacatgcctcccctgtgataagaacaagcccaaaataaaacagtggacaagaattaggagacctggtgtggtagaccatatccctctagactgaccagtagacttcatccagatgactgggctgtgaaaacttctagtatcttctagtcaatggggatatcttttccagttgagttttagaaagctttaggaagctttagaaagttttagaaatctcactaggacagaaaatgtctcagaagtagcaggggttcttctaaagaacaccattcctagttatggtatgcccaactcggttaatagcaaaaaaattcctgtctttgtctccatagtaacaaacagtgaagccaagccctaggaactgataggaaactattaatgaatgatgcctggaggcttcattaagatggaaacagtaagatggaaaagataagctagtgtccatagtctgtaaggttaagatatctttatttagataaataccagccaaatacaggccagagcatgccaggggcagctaggcatgcaggccaaagagaaagggggctcccatgtgccttgcagccccttaaaaccctatcatgcatcatcctgacctcaccttgaccacaccctgacaggtgtggtcaggcacacctgtagccagattctagcaggcatggcttacactgtcccctacaataagccatactctgaaataaattaactaaaatatattaacacactcatttaacataaaatggtccttctcaatactcctccctgcaatagggtggctgctgaagataggctagaattgagctccttgaaaattacctataagaaaccattccagacctctataaaggaactatggtcccacaatgaaactatgataataaatgctgtgtataacaacttaacttagttctagcctctgtacatgagcttgtttttcttaaggtaaggtcctatcctgagatatcatacacccctgtcaactaggaggtcaagtcctattaaagacatggagaaattgtggcccagaagatcaactaatataaagtagatacctaatgacatactcttaaccactcacactttattaaaaacttatgggtcaggttatggtccacagtacgtgagtaaagatggcagcctccataaattacccccctaaccttttatagggccaacagtcatctcatctcacagaacgacaaccaatctggaggaactcaagtatctcttaaaaataatatcaagaaagacagcttatatagtcataaattgtgatttgccactctcaactttgtctttttcttattccagcttagatccattgtaagttgtttgaaaatcagacttgtcttatgaggtctaccagtaggctaattcaatatgcagggaactccctctctctgccactgctggagccttagaaaatccagccagcctgtctatatagcaaagcctctgcaagtttcctggaatcagagagtacattttctttcacctgttcaagaacacctttttccttcctctaagcaagagaatcctaagatgtttctaactgaaacaaaatggcacctatatgacataacaggtgaacaaaatcagccacacctggtataatggagctggatggttagctgcagaaaaaaattaatggttgtcatgggattctccaagtaatagatttgactcttgccctgcaaaagatacatattatgattaactctgatggaatctatatggctcagtggtcagaattactctagggaaacaggcacattctatgccacaaggataactaaggaagggcacctaagtttgcgaagccttccaagatgaatcctctctcacttggcagcactaccttataagtggaacaccatgaaattttaaacaacatagtaaaaggctcctatggttctacctccaggccctcctcaccccaggagctgcttccattgttacagaatcatagctggaggtcttagttaaactacaacatcctcttttaatcaaagcagacggccatgacccacctaaatgaagagactgcacaaattcaccaagtggtcttcctttgctgaatgtccttggatattctgagtgttatccaagagggaattcatgctcttatcaagacaaaaaactgtgcttatatcctcagttttgcaaaagttaattgaagcattgaaagacagtcacacagccacgttgcagtatatactttcagcaactgacttgtcaattccttctcacacttacggctatcatttttcttcactttttttctttttgcttctgtttagctttctgcatttgtaagacttgtacccacacaacccatatcaccatagaaatgctgcatctccagaaaagggcacaggcagcaaaagtttctacactgtcttggtctgacacaaaaatgttcctgcaatgccactggccatccagaagcagtcattaaaggaaataacatttgacccttaatccttcattgaaatgaaatggaggctaaacaggggatttgaaggaggatgcctgccactggcttaattctactctgtccccttctggttctgaatttgccccattatcttttcttttttattatctttgagtcccaggaacaacaaaactgacagataaacatatctctgacaagagactcaaactcacccaagcagctaatgagcctgcagattgcacccaaactggatcagctttctgtgatgggaaggcaatttctggaacagatgtcatcatctcataaaaagagatggcaggggtaacagtcggtaccacgtctcagagccagaacccaggcagtgaccaactagacctctctttgaccaggattataattatgccagcttcccaactcctgtgctccagtgatttctctactccaacctaaagccatgccaataccctgacaattgacttgggatcactggtccttttatttgtctctttatctaatgtggccatgttaactaatctctgcactctgctgttcactatagctagtctcttgaggtggcatattggaatgagaggcaaagcctagactaataggctccttgagcaagcagctgcagtagggtaatggtgtgctatccttcgcagagatcttgatattcttacacagagagaaaaccacacttccctgccaaatttttgaaaagaaaactgatggctgccattaaaacatttggaagcttgtgttttaatgaaaatcatgctatttcagtcatgataaaaaaaaaagcaattgattttcaagtttaacagaatactctatctacctgtgtcctctatcacacagtattttttctgcttgacattttataaattgtttaggagtgggaaagttttgaaatgtaagtttttatttacttactcctttccttaagaagcaggatttagtgtagctcattaaattctaggaatacactagtatatgttataagattatcatttctttgttgctgttttccttttgagacgggttttgctatgcatcacaggctggtctcaaacttgctacatcattcaggcttgtctggaattcatgatcctgtcatagtttcctgagtggaatgggagaatcatggacacatgccatcatgtgcagctacactgactagtttatgagatcagaaatgcttctcaaagggagaacatagaagaatggctaaaacaggtatctgttgaacagacttcctcggttcaaattccagagctttctaccctgccttagctccctgagtaagctatggatttctccgttcttttatttcttcaactatagaatggggttttggaaatagtaacaactgcttttaagcgttgttgagagagttaggcaagtccatgtctgtgacatgtttagaatgatgtctggagtggagtaaggcaaaccagaggctttctagtcagaatgagtagatgtttgcctggagcagaggaggaacagcagagaggcatagcatttgtaaggtttgggaatttaaaacgtggcatgtttaaagagcttcaggagtcccagggagttggagcacacgttcacatctctgggcctgaggctcaagcggtcatggaaagtcagacagttcatagatggggtcttaatctgtgagcctaccacagtgaagttctgtaggggaagctgtagccacgcctgcttaggggctgactacaggtgtgcctgaccaccctgaccacgcctatgagggcatggtcagggtgaagtagagtgagggacattcaggtggcaggctctgttttcgatttcacttttggcttgctgtatagaccgctgcccaccggctggctaggtcgttctgtaagtaaggctttttccctattgaaatcccttgtatttttacctggctccatattggtattttcccacattaaagttctttccatggagcagtcccacacaatgcatgtcctaacttgtgttacaacaaatgcttcttcttgtctctataatctttttttattttaaactatggcagatttttttaaggtttaactatgttaactcaacgcagccattcaattggttttcattttattggttggtttctttcccctactttaaaagtatatttataaccattaaggattgtacaaagagtgaagagagaaatcttggaggcagttccagcctaaagaggtggcgtgtctcttctagttcagaacaatgattacctttcttggttcatgtggttcctgtaaccaaaccattgtcccccaaataagagaaaggctctgtgaacaaacaagtcagttttagctgttttcctaaaaagaacaattgtccctctaagagactcaagaaagactttagaatgactgtgatttcttgtttctcaagcatgtctgtgagtaaatatgttaaaacaaaaagaaaaagcattcatcatttggccattttttgtttaataaaaaatatatatattgtgattccacaagagcaaagaaacaatagacatgcattagtttttgtttcaaaatatttcatttccgaatacctcaggtatatcgttacttctttattcttataactgtggtcagaatgagggagaaaaattacaaatgtttcatatactaagaagttggaatattttagtggctttaattatgtagcctacatgaaataaacagaattttattttaatattttgtttccaagaggagctaaatcatttattcattgacaaataatgactgaacttctcatatgtaccagacattatttaggtcctgcctaaaggaaaacaagacaggcaaagtggctgctctgacggactttgtgtgttagtagaagcagtagactgcttttgacttttgaattaaacacacttatcccttttgtaattgtggtctccctaatctcctgttttcctgtgtatgaacaaatagtactaatacacagctctgtgaaaagtaagcatcaacaagtcccacaaacagtaatgagtgctatggcagcagtcaagcaaggtactgggataaagagttatggtggcatccttagagtgggtgataagaggaaatatccataaattggtgacaacttacaagctaagtaacaagaaagactcaggcaaggacagaatcaaagaactcagagcatcatgtcagaaggtcatgttaagaccccggaaagtccatgttctaaaacagaaagaaaatggaactgaatggagtatagaagacaaagaagcaggcaaccaatgagctcagtgaggcaggtacaatctagctcacaccagattagtgaaattaagagaactctcagtttgataggaagccatgttgcagcagggactaattttacagtgatccacactttaaaatcactcagttggaaagtgaagacattatttgggatgtcagctgagaacttatttaccacacatgtaggacagattgtttcacatttgtctggtaacagaacatgaaggatcaatctgagctgccatggatatgtttcagttccttggtatttttttattttgggtcaatattagcccctgggtagctggccttaggaaaatttaggcagaaggaaggagaaagcccaaggaatcgaaaagatctcttgtcaattgactccttttgcttttaaagcatttatacagaaataccacctaaaatttacatctcagggacctacgtcgtatatatgaccaatactttttctgaggaagactgcttttgagtttcaagttagacacactgattcccttcagaattatggtctccctaatctcctgttttcttgtgtatgaacaaataacaaagtaacagtggtaattagttgtttcataatgctgaaatttaaaatgggaacgagaagatgcacggagaaacacttcacacagcacatgatgaaataagtgctacatacttgaatgtaagcttcatgaaggtaggaaccggttctactgcatgcaagtgctcaataaatatttgttgggtgttggataaataaatgcaagaggtaaactctcatgaagtttagaggttgtggctgcggttgcaccgcaatgggtagagtgtatacgtttgtgttaaaaataaatacacaaggaaagaaacagcagcaacaggctttacaaacatacaattagctgcgcccggattaagctcaccctgcattctctggatttttggaagaaaagtcattgctagtaatgttgtctctggagcatcgccaagactcaaaacataaatttgcttcaaatgatgctctgtgaagacaggataacacagaaggaaaagtactttaactgagaaaactcaagggcttcgtagttcatttaaaaacaaaaagtaaaatatctatggttttatatattttttcatactaagagaataattgataacatatttaagaaaaatggcattatcaactagatgaaaataattattttaagcaataagttataggaaggaggtgatttatttttcataagatccaacagcatatttttggccatcaagccatttctgtgaggtcttgaatttttctttaaatagatacatagaaagtaggagtcaacacccactacctttgctccacctacatctcagttttaagctccttcttttgaagtcttagttttttaatttcttgttatcaaattttgtcttgcagaaataaaaacgatagttaataaaagttttgaaaagatctacttccaatgcccaatcggaagagaaaaactgcaagcataactctcttttcagtaggagccagacacaaggagctcatgagggacatgcaaatggatttatagtttgtttatttaatatctttttgaaattaaaatataactacatctttgtccctttgctttttctccctctaacccctcacatatgtcctctctggctttctcagattcatggcctctctttaattattgttatataatatgtattatgtatagttgtatttatatgtaatatatgttgttatatttaatatatgtgtgcctaaaaatataaatacaatctgctgagtctatataatgtttttttgcatgtatatgatttcaaggctgaccacttggtattggataaccaaatagggggaaggcgctgtttgctagggtatggctatttcttgactatgaagagtcattacaggattttaagaaggacataatgtattcagtttttaggttagaaatatgattctgtctgcaagatatgtatgatttaaggtaagttattaaagaggtagtataaagaagtggggccctgaactagtgaaaaatagtaccgttgtaatagacacctgtgagtgacttcaggttttttccaaaggtagaaattatagtagtaaacaaaaaatggatatgcagaaataaggaagatggaaaataaataaatgtatatattttacaaacaacaattgaatttagccatggaataagtctggaaagaaatataataagtgaagtttagacaggcaaaacatccactcatgctcaagtaaaagacgaatagacagcgaagcttctagagtaagttaagaggtgtatagaaaacacatggggaggggcctaggcccagcacaggaagatttggtggacttggtggaaccctggttgggggccctaccctgcctggggagtggcgggtggatggggtggggggtaggttggaggtgggggagaaggaatgggggtggggggagggagagggagagggaaagtatatgtgaaaatattaacaatttaataaaattaaaattaagaaaaaaaaaaatagaaaaccaagttaacagtgtacaagtaagtgctttcagcttccagaacaaaggagccatatctggtttaagcagcaaaagaactgatccatcagttgtgtaggcacagaatgccaggacaagggtgagaaatgagacggagtcagctacctaagtttaagtgtgtaagattgaagaaggaggtaatgcctaactttaaaagaaaaaaaaaggccgggtatatcatctaccccaaagagcttgtggttagtggggaaagcgttgaatggattttaatatcatcacagtggtggcagctatgatgcatggcaggtcaggaatctggtgggaaagagagagactaattaggatgctctcgcaatcacttggtgaaagataatgagagtgtttactaagatagcagcagtgggaaggatgtgaggacagagtgaagatatatttagttggttgggtaagaggacagaaagaggaggggtcaaagatgacggctacctccatttgagcaacaggataagaaaaatctttttaaccattttgagcacgggggggggggggaacacatcctaagctcgggccaaataattagaaagaaatgtgaaaaggaaatgtagagtatacattaggagtacgttcagagaaaagagagtccgaggaagtggagagtggtgttaaatgctactggctgtcaagttaagaaccaaaagttccccctctgatttaatggccaagtcgctgggtgaaagcagttccagtggggtggtagagacaaaaaccagactgggtgggaggacgactaagagaggaagtggtaggagtctagacaccctcttcagaaagcttagaaaataataaaaaggagacagacagacggaggcagagaggaagacgaagtaagaaagagaacaaaatgagcctataaaatagatccaacatttcccttgattgagctgttatgtatatatatgaattacatatgcatagtcatgtatgtattattatgctcaaacacatatagattatcacccttataaatatatatgttaatttctatcttatatatttaatttgttttgaatttgtaatagtaacaattttaaattataaaagttgaagattaataataagtagcatcatttagtgttctagtgaacaattttagatgataaaagtggattttaaaagtaatgttacttaaatgatattaaatagcaaaggattactagatcacagttttaatttatagagtatttcaattacatagttttgtcaattaaaaaatcgaagaataaaatactgatgaaaaggaggtagtttgcccccactgcttacattttccatatgttatttattctacaacaataagataattatttccaggctaccatttaccctctgtaggcctctggatgtttcttgtaaatggatttgtatcttatggtttgtgtgttaagtatttctttagagtaggatttatatgcttgagatcaccattcatggaacgtaagagtgccctcaatgggcaaaacacaaataacttcaccttttaacaaaacaaaaagataatttcatgtattctagaatgaagtcttctaagtccatgtttccaactttgtcttgttagtttacctatcaccaatacctaaccatgtctctgtccactatgtgcctgggactgtacagatactagggggcccatgaatacacacatccaatacctgtgcagcctccagggtttctaaaccacaaatcagacctgtaaataaattccatatgaatgctttccttaccagcccaaacacagaaacccataccatgttatactccttctctggctttgacatttcacactcaatcatagggctcagtgctcctatgggtttttttttttaatggatttattcagctggtgcatatcaggagggacttgaagatgaagtaactcccctggacaaataggacaggaattccatgagatggagacgggagaggtgtaaaggtgcttgagagtcatcctcagctttgattgtaaagctctaagtgaaaaaggtcaaaagttgttctggttttcatgtctcttgcttggcattatgggtttaggtccctcctggcaactggcaaaacagttttgccaggagctcttaggaaatcctgcactttgcaaggctggtgtggcaccagctctgagaaggaaggacagaagggcagaggagaacatcaagcttacagaaactggggtctgctgcagctgctccctatgccccgttcaccttgtcaactctcgctctctgtggaggtagcgtctttctataggcctatgctcatgtttcctctgagttccagggcctttgagccagctccctaacttcctgcgtctacgttggcataggcattaggatgaatttgttcagaaaggggctggtgaggggaagaaggaaggaaaaggggggaagtagaagggaaaggacaattgaaaaagaaacaaagaaacagaaaatgaaggagttttcagttacttccttaaagctttcttgccattaaaatatctttcccagtcataagccctctatagtttccttgagccttcacagtatagaaaaatctgttaagatcaaggatatgcagtctgaaagatctagactctagcttcttcagtttcacttactgcatctatggcactgggggaaataatctttcaactgctgagttattaagtgtgtgtgtgtgtgtgtgtgtgtgtgtgtgtgtgtgtgtgtgtgtgtgtgtctgtgtgtgtgtctgtgtgtgtgtgtgtgtgtgtgtgtgtgtgtgtgtgtgtgagagagagagagagagagagagagagagagagagagagagagagagtgatttcactggcaaaataattgatgcaattgaaaagaaatccagttcaaactatcttgctcggaaattttggggatgttgaatttgatcctataaaagaaagcatagaatccaaaaggatagaatccaaggactagctttcctgttgagacatttcttatttctattgcttttttgtgtgttggtttcatttcttttatcttaattggtctttctctatgagaaaaggaacccaacattagcatcccatcagcttcaacagaaactcatgctctctttatcaacaacaaggaaaagacttaggaatggatgtacattttggcctcactcgggccatctgtccatccttaagtgaaccactgtggccaaaggtctgagacattatgtctaaattatatcccttcttgtggccaggattatgttgtcagttacagaggcttaccacccaaacccagacaatggtcactgtccaacccatacagtttatgtgagacttggctatctgtaaaaatacaagcaatgcatgtgtgcatgtgtgcatgtatgtgtctgtgtgcgcgtgcgtgcgtgcgtgcgtgtgtgtgtgtgtgtgtgtgtgtgtgtgtgtgtgtgtgtgtgtaacaaaagaactagggaaaattccattgtccttaaaacttcttaagggttattttatctattttctttgtacctcaattaaacatagtaagttgtacatttcctctagtccatttcagccttaagaaaatcttacctattaatctccaaaggacatggatgatttattcttctcatacactatttaggtgtgatccatttctgttttttgtgtaatggttaaatttgtgtacagagtaatagagttcaccatttgtatccatgatgtacaacactcggattttatctcgagcagaaagaaagctaggtgtatggagcacagaggctgtcacccctgcaatatgtctgatcctatagctgaggaatatgcagccaaattttatagcttacaagatgcccaaactgacttccccatagatttcactgcacatttctcagctccctgcaagaacttctcagttaagtcccatccatttgggaatgccttccctggctagtaatttccaagtccgctcatgctgctcagatctcctagtcacccatttgatgaatcacttgacccctccaattagtcttcattttattaattttaatatatatacttatgtcatttccccttccttttcctctttctaaccactcccatgtccctaccttactctgtcaaatttatggtagccttattttaatatatataatattatatataattaatatattattgcatatatgttatatatatgtgatatagtgtgtatgtatatatatatatatattgcatatataaaatccaaacatacggcaagcatttgtcaagtatgtctttaacccattaagaagagaacaagtaacatggtaaacaaaattcaacaagggaggatgagagggcgagggaatgaggggatggatatgtaaatatgggtgcctctaaaataaaaaaaaaattaaaaaggcaattcaaagtgcatttgagaaaatatataagtaccacaggaaaatgttaaaagaaaacatctagaagagaagatgtttagctataaatctaatgtacaaactatatcttcgggatttgctcatgctggtgcatagaaataactgatatctctacatgacaagaatgtacaagtaaacgtggaattccatagactcttaaccttctgcatttgttccaggtttctcttacaggctgtatggttgtgggttattttggtttggtttggtttggtttggttagattttttatctattcattgtactatcatccctagaagtatagttccctcgcaccaaagttccaggtttcttttcattatgcatttagggcccatattacggaaaagtctttaaaccttctcaaacaagtcttacatatcttcttccagggaagactagagtaatgaaggagtgtctgcccaggctgccaaacaactctcctttttacggacactcttcctgccagcctggtcccacagccatgtcaatcccaaatgaacacacagacactatattaattatgaaactgttggtcactggctagggcttcttattgtctagctctgtcttaattaataacccatttctatcaatctatgtattgccatgaggctgtgacttacccagtaatgcccagcatggtattactcctctggcagcctatatggtgactggctctgcctatgtttcccagaatcctcctcatctcccagtcccacctatcttactgccctattggccaacagtgttttattcatcaaccaataagataaacatatacagaagaccattccccatcatctcctatagcctctttatccctattgagggaggtggtgaggagcgattgttactggcttcagaacagctttcattattttactttgccctcatagcatcttgctttaggatgtgagaatatgcactacctacggcattgttctcatcattaagaagtgtgttttcagcatcttatatgctcgatgttaggaccactgagctgctgtgggtgaatgtgtcttcattctgtgctctatgaacaccagttgtctcggacaagttcccctcccgttcagcaagtctatggtattcaataagtgttccctgcatgttcatatcttaaattttactttctttattcgaattacctcccaagtataaaaggtctacatacaagtgttacagtgtcttcagagattccattgtcagaggccccaatagtgagttctacatacccacccacccccaccttgtgcttctgtcacaagagacataggcgtaatggctgggagcatgcagtttgtggtcagacagaattgaatcggaaacggcaatgcaaattatcacttgggaactggggcatattactcaactgttggagattttagtttccttatacctaaaataagataatagaaacttctttccagactgttatgtgactaagtgataatgtgcttaaaatgctttgttcacacactctgtaactgatagctatcctcttatgaccctgaattcccttgttctcttatacttttctcttgtttcttctgattcagcagcaagttcaagcactcagtgggggctcttagaacatgtcccctgtacatagggaaaacgatcgtaattattatatgctccattcataagaattctccctgtctaataaacataccccatttcacttttgcatgttcccaaaattatttgcagttctccattgtaactattgtctcatagagtatcataagttgcttttaaatcgaggcctttttaggaaaaactggtagaaaatatacacaaacgtgtgtgtgtgctcgaacatttagaaggattaaatgtcctctcattctacaatgtactattcactttcatcctaatagctttgttttcatgtatcctatatccttacagcccaccagttgttaagtttttgtgttattaactggttctatatagttactttgtattttgagggtatatattttctattttactatagtcatacttatttgtaagtaactatagtatgtctaactattgaatgtagatgtgaatagttacctaggtttagaaactgtcaccaaatattttccaaattagtaatgactcataggcaataccttgtcaataactgatttcttcaaagctctcattttattttcaagatgcacttaataattgttttctagaaatgttaattctatgtgtatgggtgtgtggcctgcacatatatgtgggtaccacatgtgtgcctggtgcctgcagaggtcagaagaatgtgtcagatcccctggaactgaagttaaggttgtttgtgagccaccatgggagtgttctgaacaaaactcatgtctttgctggattcttcaatagacttaaaatagccatcagtttatgtatttttgaaagactaaatgaacagggatagaaatgttaactggatattcaaaataaaacgaaagaactcaactgactaaaatgttctcaattggactggagaaatagctcggtggttatggacatttgctatctgtagagacaacccaggtttggttcccagcatccatgtggtggctcataaccatccataactccagctccaggggatccaataccctcttctggcctctgcagccactgttcacacatggtgcacacacatacatgaaggtaaatacacttatacacacaaaataaaactcagtcaatgtttaaaaagtgtctccctactaactgataaaggaaaatagtaaatatagatataagactccttcataaacaggttccctgtattcttgcctactctacttgttaccttgtttcctttcattttcattcatcatttatggcaaaatttcatcacacaattatttcatatatcatttccatcagcattccaattattttcttaggaaaaaatttatgggaaaaatcgtcatcattgttatttattaaatccccatagcacttttggagctcagatgttcatttaaatattttacatataattgcatatgtctctcattatctgataatattgacagttttataatgccccccccttaaaagataaggaagcaaggtttggcagttatgcaactatttccaggtttcagagtgtgctaataaatgaagagatggaggtaatgcaagaggcagctgttggtgaagataagaagaaacaaaaggagaaaactaagaaagttcaacattatatacaaagaccaaggatctaacgtcctcttccaacttcatggatccacagtcatgtaaacccacactcctgtgcaaaacacacacacacacacacacacacacacacacacacacacacacagaagtaaaatgtaaccatttttgattctgtggttctatttcatttatcaattgatcaatgtatttactcacttgccaaaatctatctggttagctactatgctgaaactaaagagaaagtcttcattatcagaaagaattaaataatagtcaggctggaaaaatggctcagtgattaagatcactgactactcttccataggacctgggttcaattcccacatggcagctcataactgtctgtaattccaattccaggggacctgacactcaggcaaaatatcaatgcacattttttaaaaggttaagattataggtagaataataatataagaaggaaaatttaagaaaaacattgttttttacaatgtctaagtaattctcatataatttaaatagcaaattgatagctattaacattgtaaatacaatatgccattgtatgtgtataatataagcataggtacagagaaagagaaattttgcatagcaatttattctacttagtcaatatctactagaaacaagtagtaagaaaacaaatggatgtttcatttcctcttaccaaagcctttttaaaaacagtattaaatatttatggtttcatttttataaacattttatgtgtgaagttagagtaaaagtttcctactccctggagtcaatttgtgctcaagtagaaacaatgacatcatagtgggcaatgtgtttcacattgttcctcgctaagaagtggtcagttttagtcgtttgtatttacaaggtaaaaccacagaggagctgccttggtctgcaaccctacagtgtaaaactgtaaatactgaaaaccaaaatgtgtctgactttctgagagctttctttgagccactgtgttgctactaacttatctgtatcatcaccacccaactgagagttagaatcaaagtcaaaacccacagaatgatctaaaagcaagacaaactctgcaagtgggttttcctttatgcttctccaaaccgggtttccatgtccatttgaactgatatcgggagaagacatcttgttcacacttggatcgttataggactttatctgctctttctccatttagtatactttgtagaaggccacaggtttatagcgttgaatcatcttacatatcacagaccttatcaaatactctttgccatctccaggacaaaactcacattatttgggaaggtatttctaattccctccctatagttgttgcttcaccttgctcatgacaccaaaccatcatgttgcaatattaaataacatttgatacaagttaacacattcttacaacacaatagtaaacatacaaagtggaaaaattaaagaacagctaaaactgggttttacaggatgaccataattgatagtttactggtagggcactcacctgtttttttttttttattacaagcagcatgccaaaagaaataagcaaatattaatataaccaaggtttcagttatctctaatgcttattgggaacactggctttgggaaagccattgaaaactctagacatcactgcttccagaactatagtgggaaacagaaattgtaatacatctgcatagaggaattgcattatatcgccttggatatcctgctaagaagttttactcattgacgttattgttctgcttaaaatagattacattaaagtatcttccatttctaacactgaaatccattggcaactttcatcactatgtttctgagagtagattagcagaatatcacatcatcgtgtagatgaactaagtgaatttacaagagaatactttgcctgatgtttccctttattgagcccatttcctccatcattttttttggttattataagattagaacttcatggctttaaataatactgacaaccatgtgctataattattactaggtataattacaatatctgtgtcaaattctataaaatgtttataggagactttccttatatcatgattctaaaccaaatttaaatacattaaaacataagtttcagatatatcatttactaataaatatgctaaacttaagagcttttctttaaaacttcagatcttgcataaagtgtatactgtcagatgtttttcttcttattcctttaaggtattttttattaaatttgcatagatatttgtggttggtgcataccatggcacatgtgtagaggtcagaggacaacttgcagtagctggttctctactttcgccatgtggattctgggcattgaatttgggtcatcagcttcaccttagcatcttcacccactgagctacaccattggtcctctctttgaaacaagctaaaaggctgacaaacttttgtaaagtttcagttgcttctgcatgcttaattattaaagaacttgagtttatcagtgtggtgttgtagtattgcctaactttcaccaacatacattatcttaatagctacttgttagtttacaggcatgccctagctataaagtaatcaatactggaaatctcaagaatcgcttcaattgtatcatgatttataaagttaataaaagcgtctagaagctttgtaaccaagatgtcccattcactctcagaattatatcatctgcctattttgcctatataatcagcctgtttctgtcagtctgcttattacagctgtgctggcacccactctgaccaccatgcccagaacagctgcatgccattctgcgtgtataacaaaaacagctagcataaacacattgaccttcagatgacacctaatgtaggcggtttgtatacataatcatggccacagactgcctggcttggtcaaagccatgaaacaagtgtgggtttggttacaacttagagtccttcagtgtctagtttggggttaccttaacaccaacttgaactactttgggttttctccagtaagcacagtggatatcgtctcaattttatagaatgtgttatttatgaaaaagtggcatcaatctaaagtcattgcctttttatcaaaaaaaatcctttttttgtccaggatattctgatagaggttacccctaagatcactctctttaacaattttgctttacaaatgggatgtgtgcatacatttaagaaagacacggtggcatgtcttccttgagtatcaattttactctattatttagtagacagtatgccaagaataacctgtattaaaatgtttgaaaagcgtgtgatatccatacacagtttaaaaacatgagccttcagaaaggtaactcttcattagtcattctcccttcgctccactgcactccgtctttcctccctcaaaagccagttccctttaaatacaggtacccaaagatccaaagctgacacccacatgtaacagaatgtgtgacatttgtcttcctgggcctgtattacctcaataagaatgattattttcaaccccattcatggacctgcagatttcacaattttatttgacttcaacagccagataacattacactgtataaatgtaccacatgttcattacccacttatcatttgataggcatgcaggttgatcttacttcctggctattgtgagcatagcagcagtagatatggataagcaagtatttctatgacagtatatagtcttctgtgcataggccaaggagggtctagctatgtatatggtacatcatttctagcttttgaagaaccatcacagtgatttctatagtggctgccccaatttgtactcccaccgacagtgaataaacgttcccttcccccacacatgtgccagcatttgttgtcatttagtttttcttattctcagccattctggctgaaataagatgaaatttcaaaattgttttgatttgtacttccctggtggctactaaggatgctgaagatttttaaaaattacttctcagccatttgtatttctttcaataactctggatagtaccatatcccagtttttagggttttttattctttatatattttagatactaaccctctgtcagatatacagctgacaaagatttttttccccatccagtgggcttcctcttgaatgatggtatcttttgctgtacagaagcttttttagtctcatgagctccattcatcaattgtttgtcgtaatggctgtgctactgggatctgttcagaaagtcctttcctgtccctctaagtcccaactctctcttctataagagtcaggataccagcttttatgtcaaggtcctcgttctatttggagttgacatttttagacttattccaatattttttatctttttgagactattataaataaacgtattgctatgacttctttttcagtatgtttatcattggtatgcttatcattggcactttgctgagtacatttatcagttgcaaaagttgtttggtggacttgtaaggccttttatgtataaaatcatatcatgtgcaaataaggatactttgacttcttcctttactacttctatctgtcttattgatctagctaatatttcatgaactataaagaacaagggtggagtacgtgagcatacttctcttgttcttgattacagtggaaattctttgaactttttccccatttagcatgacattggctgtggacttgctatatattgcctttattgtattgagatatatagtctgtagccctagattctccaagattttttatcatgaaatcatgtcatgtttgtcaatggtattttctatatatgaagggatgatcgtgtagtttctgtccttgaatgtatttatgtggtggattatatttattgatttatgtttattgaaatatcagatcagaagaagaagcttggggagagataacactaaaggccttttctatatctaatgagatgatcatatagtttctgtccttggatatatttatgtgatgggttatatttattgattcatatatgttgaaatatcaaacatgaagtattatggagagataactaatgctaaagacaatggagaattcatgtgtaaatctggtactacagaagctttttaaaatatacacataatataaagaatataaatgcagttactctataaggaggggcattgcctctccaagaaaccaatgtgttaccttttttagagttattggtcggtggaatcacatctacccccaaaaactacaggctgttgtcatttctcttggctaccctccagaaattgacagcaataccctattgctaaagataccacactcttgagtcatgggacacagaggaataaaactaacattaacctggaaatgccattcctactggctgtctttcatagttctggatggcagtaattcatgccttccaggggagaaaagtattcatcaatattacccagctgtgaattctgaaagctacaataatgactggcctggtagactatgcacactggttcaatggtggcacgaatgttatggaagtaaccaaccactttctgattggatctagggcccactccagaagctaggattaattctggggccaagaacctgtaactatataaatcatagatgttgggagccatacagcttggcatgaacctttaggtcaaacttggcaagccacatggttatagaactgtcttttgattataaatggcttctagaagcatgagcacccagaaggaacaacatgacccagacgtcaatcctttgttccaaccacaaacccacttacctaagcaaccttccttcttcccaccactcacctaggtaaccctccctctccccaccacccatgaactttttaccctgccaacatctgtttaaactaacacctggctcttggcctcttctccccctcccttttaccccatactactgactatataatctagcctggaaaaaataaaatctgccacttgatcagaatactgtcttgtggtcattctctcgaatctcttgtctccattcccctccctggacttcttgctgtaggttgctgtcctgtgggtcgggacaactacacataggcactagggtataatctactagtattattcttctaaatgaacatattattaaactgaatcctgaggacttaccattatactcatggactaatacatcttgcaacactaattggagaagcttccttttgcaatagacagttattagcacagaaacctacaatattcaatgttcaaaaaataagaaactgcaatgtactcatccttaagtgagacatctatgtcatgccctaccctctcaaggatcaggatttactgaggaaaaaaaggggcaaaaactttgtaagagccagaagcagtagataactatagtaaacagtgtttttggattaaatgggggagaaacttaaagcaattccactaaaatcagagacatggttgtctgctctctccatatttattcaatatagtacctgaagttttagcgaaagcaataaggcaactaaaggagatcaaggggatacaaactggaaaggaagaagtcaaagcatcactatttgcagatgatatgatagtatacataaacaaccacaaagattctatcagtgtactcctaaacaccttcagcaaagtggctggatactcagtggttagggacactggctgctctttcaatggtcctgagttcaattccaggcaacctcactgaggctcacaaaataaactttaaaaaaatcagtagcccacctatatacaaacaataaatgtgctgaaaaagaaattagggaaataacacccttcataataaacacaaataatataaaatatcttggtgtaattctaaccaaacaagtgaaagatctttttggcaagaacctcaagtcttttttttttttttttttttttttttttttttttggttttttgagacagggtttctctgtggctttgcagcctgtcctggaactcactctggagaccaggctggtctcgaactcacggagatccaccttcctctgcctcccgagtgctggaattaaaggcgtgcaccaccaccgcccagcgagaacctcaagtcttaaacaaagaaattgaagaagatatcagaagatagaaaggtctcccatgctcatggattggtaggattagcatagtaaaaatggtcaccctaccaaaagcaatctacagattcccatcaaaactttaacacaattcttttcatatagaaaagcaaagagcccaagataggtaaaaaacaatcctgtataataaaagaacttccctgtataataaaagaacttctagaggtatcaccatccctgatttcaaactgtactacagagcaatagtaataaaataccgcatgcttttgtcaaaaaaaatagacaggttgaccaatgcaactgaattgaaggaccagacattaatccacgtacctatgagcacccaagttttttttttttatatataaagaagccagaaaaatatggtggaaaaaagatagcatcttcaacaaatggtgctggtataacttcataccaagccgggcgttggtggtggcaaccaaactttaatcccagcacttgggaggcagaggcaggcagatctctgtgagttcaaggccagtctggtctacaaagcaagttccaggacaacatgcaaagcaatacagagaaaccctgtcttgaaaaacaaaacaaaaaaccaacttgcatgccagtatgtaagaagaatgtaaatatatacatatctatcaccctgtacaaagtccaagtggatcaaagacctcaacataaatccagatacactgaacctgatttaaaaaaaaaaaaagtgggtatagccttgcacgcattggtacagagacaacttcctgaacaaaacaccaatcatgcagacactaagattaacaattaataaagaggacctcatgaaactgaaaagcatttgtaaggcaaagtacattgtcaaaaaaacaaaacagctacagaatggaaaaggatcttcaccaaccccacatctgacagagggctgatttccaaactatataaagaattcaaactagatatcaaaaaaatcaaatgatcccatttttaaaatgtggtacaaatctaaagaatcccaacaaggaaatctcaattggctgagaagcacttaaagaaatgatcagcatccttagccatcagggaaatgcaaatcaaaacaactctgagactccatcttaacacctgtcagaatggctaagatcaaaaacacaagtgacagctcagactggtgagaatatggatcaagggggacactcctccattgctggtgtgagtgcaacttgtacagccactttggaaatcaatattgttgtttctcagaaaattggaaatcgacctacctcaggagccagatacaccattcctgggcatatacccaaagggtgctttacatatcagaaggacatctgcttaactatgttcatagtagctttattcataatagaaactggaaacaatctacatgttcatcaaccaaagaatggataaagaaaatgtggtgcatttacacaatggagtattgctcaggatggaactagaaaagaccatcgtgagtgaggcaacccagaactagaaagataaacaagttagatgctcacttataggtgtatattagtcacaaattaaaggataaccattctacaatccacagacccatataagctaaataagggaaggagcacatgaatctcactgtgaagggggaaaagaatagccatcatagtgaggaggttctgaatgggggtggacatgggaataagagggttcagattggagcaggatggaaggagagcgtgctggcaaagtcaactggaatcaggggcatctctggaatgagctagacacctagatcaatggaaacttccaggaatctatgagggtgaccctagctaagacttctagcaatgggggatatcaagtatgaactggcccataaccaggaaataatacttccagtggagggaatgggaccccaacctatgcgtataacatttaacctataatttgtccttcctataagatatgctgaggtacaggtggtgccaaaattttaggagtgggcaatcaatgattggtctagcctgagacccatactatgagagggaacctatccctgacactgcctggaagactagaacccagaggctggacagtccagagacctaggatagaaccaaacatgactggcaaaaaaagtcaataaaatgattcctaatgatatgatattctactatagtcatagattgttgcatagcccaaatgccatcagagcagcttcacccagcaactcatgaaaacatatgcagagacccacagtcaaacaagcagacctcaggggatcctatggaagagaggaaggaaggattgtgggagccagaagggccaaggacaccacaagaaaattcacaaaatcaacttgcctgggtgtacagggactcacagacagaacaatcaaccagagagcttgccatgggactgacctaggccctctgcacctatgttacagttgtgtagcttggtcttcctgtaggactctggaggctgactccaactctgttgcctgcttttgggaccctttcctcctactgggttgccctccagccttaataggagaggagatgccaagcctcgctgtaacttgatatgacttggagggctgatatacatgggaggccttcccttttctgaagaaaaaggagtagtagatggggggatgagagagggaggcttggggagggactgggaagagaagagggagggagggagggagggaggggagactgatcaggctgtaaaattttaattggttaattataataaaactgttttttagaacacaacagggtagctgaacatatacactcagagtgtgcacaaggcttgcctaagatcaagccaaacaaaaacacaattgatggaacaccccacctctagctgaggagccattggcaattatggctgctgggaaaagagtcagtgttttgcaatgatgtgagcactgagaagctactcatgctctagcacagtggttctcaactttcctaatgctgagaccctttaatacagttcctcatgctgtgtgaccccccaaccacaaagctgtttttgttgctacttcataactgtacctttgctactgctatgaatcataatgtaaatatttttggagatagatgtttgttggtgaggtcactgtcaccaggctgagaaccactgctctagttgctgcccctatgcccatatacatactttgaagcactatggggacttaaaggggaaaaaaaggagaataaccccagtggcataatatataaccgcagtgcttaatggaattagtggggggagaaagaagaaatgaagttgagaaggaataattgatataaagggaatgaggtgaacttggtcaaaacatatgtatgcaaagcctttgcatcagctgagccaggggagggtagctcattcccctcattaaataaaattctttttgtgacagataaaaactattacacacccacaactggtcaaaaggcagaggataggtgactgtgggatgtccagcaccaattggtacatctacagtgcagccctacatctgagcctcagggaagatcacaggaaaggaggaaagatcagaagagccagaggaccaggatacctgtttcctggtggtgtcttctagacatgacagggaggcttcacccacaaaattgcaacaagacctgcatcatgacaccactaatcaacatgccgttgtggacaggaaaaccttgcaaggtcccacccctagatgaagagatataggcaaccaatggccctgagagaaggataatgctttccccaggggagggtctgggtgtgggtgtggtcatgtgtgcgtgggggggtatgagtgtgggtgtgtgcacggaggggaagagcatgagtagggagtacgtgtatttgtgtgtatttgtgtgtgtgtgtgtgtgtgtgtgtgtgtgtgtgtgtgtgtgtgtgtgtgtaaaacagtaataatcttaaaagaagaggtggtcagtttaagggagagtcaggaggacaaaggtggagatggaaggagaagaagtagtagtgaaaatggatgaaaatacagtgctcatgaatgagatccttgcaaaaaataaaatttaagttaaaaacccacattgcattcgggtatgaaactctcaaacaataaggatgttgaatctttacattagaaaattcacacatattgttacactatttaaaatatctaggaagtagaacaagtctatatactcaacaacaaatgaatgagtagagaaaatgtggtacaaacgcacaacagaatattttcagccattaaaaagtgaaatcgtgccagagggtggtgatgcacacccctttaatcccagtactcaggaggcagaggcaggcagatctctgtaagttcaaggtctacagagcaagttccaggacagccagggctacagagagaaaaactgtcttgaaaaacaaatttaaaaaaatgctgctccttatattagaaaaatatattgtttttcaatctttcagtaattaaaaagcacacaaatatatagctttactactatctatttcaaatcttagtttagtataatactaaaaagaaaaaattagcgaggcatggtgatgcacacacttcacacctttaatcacaacacttgagaggcagagacaggggcatctctgagttcgaggtcagcctgacctatagagagtgccaagacaaccagggctacacagagaaaccctgtcttaaattaaaaaaaaaaaaagcaaatcaaacaaacaaatcttactattaaatttctgccaagttttcaactatttgtagtatttattttctacctggtgtcatagtttgggctaattttcttaggcagagactgtgttatacccacacaaatataaaggtttcaaacagtcaagtttttgaaaattacacatcaaaaaatttaaaaaaagaaaattacacatcacaaactagaggcttatagcttgactattaagttttaaaggatagaatattttgaaaggcctggtttcctttcagaaagccaagcacactttgaaacctccaaatgtaactgtcacggtcgcctgtgtgtcgaggctggtttcctggatggaccactttctggggaatctcttggtgtgcttgaaagagcacgtttcatttcactcttgcctcacacaaggcatgtgcgatatttcccttggtcccgtaaccctaacaagtttacatttctgcaactctctgtctacccctcctctaatacgcatttgtgaagatgaactttagacaaactcactgttgttttccgagtaaaacaatttgaacataatgttcccacctacaagttaaccaaatcatttgataaaattggtggtactgaaattgaggatgtctaaaaacagcagcatctgtgtccttgggactctggggtgatataaatacaatggctgagagcatttttaaccacagaatgtctgccttttatacattcgtaaggttgttgagttgttcttttcatggtccttactaaaatgcttatgtcaagggaacacacaactgtctgcttattcttttttcaaaatgaatccatatttgtagccttctcgtaatgtctggttcaacttccagccaaaccagcaaatacagtctctcaggaatgacaccaattctatactgtttgttgacaatctgtctgataaagaatcataacccatatcatatatttgtgtgtgtgtgttgtatcatatgtgtgtatatgagcacacacaaacctcaggttgatttagccctctggaataatttctaatcagtctttataatctaaaaatgtagctccaaatttttgaaatgtcatgtctgatatgagatattgtacattatgtagagaatataatattttttcttttttattaaattttactgacttgtcacaaaaaaaaatctgatttttggttaaatcattactcacagtattgcctgtgtctggggaaacatgctagcctaattagtatgaaactgaggttctttcttgctgatggaacaatgaagtaaattgaatttaggtgacctatcacaatagcattagtgattcagaccactggctgacaagaccattaagactgacccaaaggaaaccatacccatttaaggagaaacaaggagacactttctgtagctttactgcagatctcttttccttaaacaaatcctgtgggaactggcaattccgtgccaaaacacaggattctttagtcaaaatattcaaaggagggagtttttacattcttttggtaatctaaggactcagtagaaaaaataatagcaggaacataaggacatagtcataagcaataaccaaagctatgaaaagaattcagaaaataatatatggataaaatgcaaagttagtgtacatggattcagccaagaatagttacaaataattagcctgagctacccagcttccctggctataggtgccaagttcaggaggtaaacagttctccaatttagcatgtgtggaaggctccaattctaataataaaacatcttttaaatttttttgtactgcttgaatgcctggcagggccagaagacagcatcggtgcccctgaaactggagccgcggaaggttgtatgccacatgatgagggtgctgggtgctcttaaccgctgagctatctctgccccctgcagaagctgcctgcattgctatggtatagatgagatcttagaaagtcatattatatgcatttgttagaagcacagggcctggaggtaactgattcaaggatagacactcctttctaatatttaatttactcaaatgtaagatacagtatttcactacttcactaaggagtgagaatcaaataagacaaaatagaaatgttttaatgtacataatgtttctttattaatgatgttttggtggtattaattatgcttataaccctagactttgatgttcttctctgtaacaaaaaaaaaaaaagaaagaaagaaagattagtattaacaagagccccattttgctggccttgctgctgatactgggttacttgacaacaattttctatgcttttaacaaatgtatttttcaggaaatgacctttttgtactgttttgactctcctatttttcaaaaagagaaatgttatggaagaaaatgtgcattaatgctttccttcatttgctacttgtggctctgggacgtctttttcttccttgtcctaccttccagtctgttgctttgctgtatctttgcgttttgctcttagcatgtgtcatttccaaagccattcctcagaaactttagttatgttttaatagatagtttcagatgggtggaacttgctagtctgcccctcattacgttgcttctgactttgactgagggaggaaacagccagcatgactagggcactggacagggctccctgaactcggagatcacgagcacctagtgcttctctaattacatgtctcattcctggccatttaacaacctcaccacagggagtgactccacatcctgacggaaggctcccttcattagcttcaactatacatcataaccttctagctttacaatatcccaagggccatccctcccagggctgtggcaataggacactcttcatatttgaacatggacacagataacaattaatgacctccaactataagctgaaaaaagtgaaaactaagggtttgattttggggggtgttgttcgtttgtttgtttttaaggagctgcttacccaaatagcagctaaaaatcaagaattttatttcatctctttcttgaaaggcttacagtaagactcctcaatgctactgaagttaagtaaaagaagaacctgaaaaagcacatgagctatggagacaacactgcgattcaaggtctcatacattgagatttgaaagaaaaacaatcggattggaattttgagacctggattcaagctttgtttccatacgcaatgctaataatcacactaaccatgttgtgtggtaaatcctcatgtgtcaggctctgcatgaggcactttcagttactgtagggagacactctagccctgccccaggtaaccaggataggtgtgcacacgcccgtgagggtggggtgaggggaagtctaaggtgaggtaggataggcttcttaagggaccacagacacatggacgctctcttctctccttctgctggccctggtcccggctccctcctccttgctttggcttgtgcttggctggtatatccgaataaagaaaaccttgccctattgactgctggttgatcactaacaagttacctccatttatatgaaagaaaaccttcacagagaacatcagaaagttggcaaggacactcaaagaaaggcacaactgaaatttgaactctttgttttcctggaatataaatactaggcttttcatgaatctattgcttcctttaggctctattgcctcatgatagcatattacttaaacatttaagaaagcagtgttcccacctttgaatgtccatggacacatcttagtgagcttctaatacactgaaatatttttatctcaatggaaagtaattttactgactgtttgttatgaatcacattcttgttactatcttaatcctgaaaatatgtcttcattcctaggtgaaaattctcaggcttagaaaggttaaataacaaggtccaatggcacacttgcattggtgagactcattttcatcatatttccatccatgacgctaagaaacatagatcatgtatgtatgttttctaaattatcttcctggacaagtgagaatataagattcatcttctcactgatcaaagttgtgtctggtactgttagacccccgaaaactcaagtatccggggtcttaggccaggttcgtggtcaccccaatcaccaggcggattcgagagcttgctgcaaactgcacgaggctttattgtaatttaacgaactaaccccatgttagctcgggtctttcacccacccaccatggcggatggctagaaaagacggctccaacgggctcccaaaagatcttatagggcagcgtaaggggaatgtctaggggtatgcacaggcttacgcacaggctcacgattggtgtgcttccaggcttgccctgtgttgattggtcaactggttgttatggcccataggccctcccagggtggttgctatgctctctatgtcattgtcatggcttgtccgtaaagcacacccagggtcgtaaagcatagtgccaccagctaacttctgattggttccttgtcacaagacaggcatctgacctctaagtgactaaggttccttgtcacgagacaggcatctgacctctacgtgaccaaggcaggtttatggcaagcacgtgttcggctgttatggctgccaaaaggaagctggttccttcagtacaaaataagcattcaacaggtatttattgagtgatgatcaattttagttcagtcattggtttatttgactaaatggcttttacatcatgaagaaaaccatgagggtatctaaacactggttcacaggataggagttaatggctaagccatatatcataaagttaccacttcaaacatctttctagttacaataaatccttgctttggggaaaactaaaacttacagttcacttatatcttgagcttcatattttgcggtgcagttaataatacggtcaatggagataacaaacaggagatgcttttatgaaaggccatcaaaaagatgaaaacccattccacattcaaaagaagactgccttaagatgtaatagttctatggagagaactagtatttccatattttccttacttcatttccaaatgtttgttatctaccattccattagtgaatattgaatgaataggtagatgaataaaaaatagagtaaactgaatgtcaaatctaattaaaactaattttggcttactttaaataaaagcctatcttgtaatttcattcagctgcctcagtaaatggcacatagactttaggtttgcataatgaggcctagattcagaaatcagtttaaaaagacttgaagtcaccttacagatagacctgcagacttctgttattttagcattgctcacatagcctgttatggaaccagtccatcatgaagaactagagattatcatgttaagcaaaacaagctagactcacaagaacaaatatctctcatgtatggaacttaggaggaggggaacatgaaaaaaacagggtgaggaaaaggtgagagggagtaagaaaaggcactagagggcaaaagatgatcaaagcatgttacatgcatgcataaagtgtcataaggaatccaattacttataaaaacatagatttgtttcccatcatctttgtatgctcactgcaaggcattttgcccacaagaaagtatcaaaatacttgatttgttttataaaattcaaaaatttctttacagtggcatgtgtatttatttaggtctccatataaaactcagtgaaataatccatccttctccaagtccttgtgctgttctagagtagtattatctctacctggatttctgcagaagttcctcatgggtctctctgcttctgcttattgccagaaaagttcttttcattgtgatttgacttatgttggctctcttgtctaatggggaaagatttcacacaggtctgacaacttctcagaataccttttgggagaaatgggatcgaagataacactgaagcagtgatgagtgggaccacaaaccttgacaaggacagcttagagatgcattcctcttgccctctatttaaacctaaaccttatttgaggacctcaaagactgtatgtggtacaggaacttaacccattcttgttgttccttagaacaagaccatcccttactcataaattgatggcttat

SEQ ID NO: 21 - DNA, 18 bp, synthetic construct
  source 1..18: mol_type = other DNA; note = Hot spot 1 - integration site
aatggctgggagcatgca

SEQ ID NO: 22 - DNA, 26290500 bp, synthetic construct (residues 1-2,190,875 of 26,290,500)
  source 1..26290500: mol_type = other DNA; note = Hot spot 1 - Chr 3 contig ref|NW_020822499.1 from Cricetulus griseus
gctgtggatatggcttagttgaccagtggcttcctactgtgcctgaggccctgagatcaatttataaaaaaataaaataaaaaaaaaatctgaccactattacagattatttttagtattttaagtgtggttaatattcatcctaccaatatgacattacagcctgtgggtttggcctagcatttctcattcaaaagagttctgcattttttttccgaaaattgtgtgtgtgtgtgtgtgtgtgtgtgtgacctacatgtgctagtgcccaaagagactagtagaggtggtcattggattctctgaagcaagagttacctacagctgtgagctacctgacatgggtactgggaaccaaactcaggtcctatagaacagtaagcattcataacaatgaaccattgttcactctagcttctatgtataattctctctctctctctctctctctctctctctcctctctctctctctcctctctctctctcctctctctctctctctctctctctccctctctctctttctgttttttttaaagcaagatctcacataccccaggctgttcttgactcttaagtagcaaaagatgaccttgaaattctgatcctttgcctccacttcctgaatattggaattacagtctgagctccaagcctagctcaaaatttttctttctgttggtactggggggatggctcagtggttaaaaacattagctgctctaccaaaagacccaagcttcatttccagtacctacttggtgcctcacaatcctctgagactctagtcccaagggacatgatcatctgttttggcttctgcagtcaccaggtatagacatacatgcagacaagacattcatacatattttaaaaattatctttctttttaagtctttcttgtattgtggtatgggtgtgggtggtatgtacagtacacatgtgtctgtttatgtggctggataagtcccatatatgcacattcagaggccagaggttcacaacaggtgtcttactctattgctctccacattttaaaaaaattttctgccaggcagtgatgacccatgccttttatcccagcccttaggagacagaggcaggtggatctctgtgagttcaagaccagcctggtctacaagagctagttccaggacagcctccaaagccacagagaaaccctgtcttgaaaaaaaaaatgtttttctaagtatctatgtatgtttaacatatgttacagaaatataatgaaatctgtaccaagcattcttctacaggtggtaagattcatattgaagagcattgtaacatcattctcctgttacaaacctatttgttttctccaaaacaatgaaattatctgaattcagagtgctccatttcagcttctagatgaatgaacacatttgtttccattagcaacattatgcatatgctttacttgtgtattccatttgaaatgtgatcaataagaaggcagtcataattagtcaaacaagtcaaaaacgacttatgtagtctaataagcaaaaagcttataacagcttttcctgcctcaatgcctccaaaccccccgaagcaattgttaccaattttgtggaaaaattaatattgatatatttacagatatataaggaatttatgcacactgttacattttatttcatcagtttaaaatgttatttgttgacttatagatacgaggatttggttcctaagtttaccttcttttatactctctctgcccaggatactcaatattactgtgttggggtttggggtttttgtttgtttgtttgttttcttttttgagatgtgagtttctctgtgtggctttggagcctgtcctggaactcactctgtagaccaggctgggcttgaactcagagatagatccacctgcctctgcctccccagtactgggactaaaggtgtgcaccaccaccaccacctggctactatttttattaaatcagtattctgtgtttgggttattttgcctattcatggctgagcatttcattctagtggctgagctagggatcttacgattgtgtttatatgccaatctactttcatccagtggaacaagcatttagagaatcctttcagcctggcaactcatttccttcagttctcagaaatgcttttgaataattcatcaaacattctactcatttgctgtcttcttgcttctgaaactcttatgtattggatttccacttcccagcatgcactactattatctcttgacatattttttcaagtagtctgtatgtatattaaaaatagtatgatcacaactgagtagttttgcatcctggattaacataactgaagcattcttccaagaccttaaaagttgctcctaagcctcattcccatttgtctgatctttaagatttaagacttttgagtaatgtctgtgaacaactgagggtgccattctttattataagcatgtgtttctaactcctggagtcatgttaggttgttatgtctgtgggtatgaatactgaatactgaagagatcatcagtaaatatgtcttcatgcatctgtaaactatggagaaagcacagttcataaactgcttataaccttgtaaataacagtttaaaatgcttaaataacgtaggaatgtagttcagttggttgagtgcttatctaatttacacaaagccctgggtttaatccctagcgccatgtaaacccaggtatgatggtgcattcccataatcccactggggaggagaggtaggatgtaggatgattcaagtacatcctggactacatagtaaggtttgaagctacatgagactgtcttttaaaaaaaaaaaaaagataatatagagataatatagttttccaaatctagattttgattactgtcttttgggttttttggtttttttggttttgtttttgcctttttgagacagggtctctctgtgtggctttggagcctatcctggcactcactctgtaaaccaggctgcctccaactcacagagatccgcctgcctctgcttcccgagtgctgggattaaaggcgtgtgccaccaacacctggctctgtcttgtgttttcaaatagtataatttcagtagctaaagttaatggggaaaaggaaaaagagattgcctgttcaaattttggcttgctgttaggtcgggaacatacccagactttctcctgacctaaacactttttttgtttttgtttttgtgacagggtttctctgtgtgtagactgtattggaactcactttgtagaccaggctggcctcaaactcacagagatccacctacctatgccacccgagtactgggattaaaagcgtgtgccaccaacgctgggcttcccaaacacttcctattggtgttttcccatgtgtttatccctcaattgttctcaaattgtgtttaaattgccatgacactgctaaggtcatttcctaatagggaccctctctagccactttttctaagacagctcccccaaactctctcagggccccttttattcctttccatacacagaaaaagaatatatttaatttgttgttctccattctttctgtccttagacagggtttcatgtagctcaggctggcctagaacttgcttcgtagccaaggatggccttgaactgctgagcctccagcctcctccattcatgtttgttcattttgtgcagaattctgttcagattacagagttgactttttgtgtattttctgttagtgggcatttagattgtttctagtttgggactatagctaattttgctgttatgaatatgatagtacatgtattttcatgcacatttgttcatgttttgttgggcttatttatagataaaattgaaaccaatggctattttaaagcatagtttcagtgggtactactcaacaggttttcatggcttttgtctgtcttcatgctagtatcatattatcttaaccactacagcttaataatgatattagtaatgcttggtataaatgcttcatattccttttcaaaacaccttgcataatggctcatacctagcacttgggaagctgaagcaggagagtcattgagttcaaggtcagtctgggcttcatagtatcttctggtcacctgggatgaaaaaaaaacagacaagaccctatgtgctgcctccaccacctcactatatatctgacttcatgtgtcctcctccagggtctagcatgataagtgtgggccccactccccatcaaggaaacttctatttgcaacagagagagatcattacagaaagccacaaccaaccaaaatacagagttgtagagccctgtcccagtggctacatctacaactcctgcaccaaaggctcaggtaacattgtggaagaggcagagggtccctttacggagagattatgtctgctagtgacatcagaagccatacctggggctgagagatggctcagaggttaagagcactgactgctcttccagaggtcctgagttcaattcccagcaaccacatggtgggtaacaaccatctgttatgatatctggtgccctcttctggtgtgcagatatacatggaagcagaatgttgtatacataataaacaaataaataaaaaaaagaatgtttaaaagaaaaaaaaaagaagccatacctgtaaagtctcatcaacaggatggcccaaatgtagctagacaagcacggacaccaacaaacatgccaaactgcatgggaaaaggctaggaggtcttaaccctacacaaacaactgagacaactggggaaagctgggggcaggacacgtcatcttccccagggaagagcacacccaatttgttttccagtgctaaatggtcagccctgaaaacatgcacacagtaacactgtgtggactcagcaggttatatttagaaatatatacagatatgtatgcagtgacaattgatgaaaagagaggcaattaatttgaaggagagctgggagggaaatatgggaaagttttgaaggaggaaggggaagaggaagggagagatttaattaaaatataatcttacaatcaatgaaagaaaaatgaagattcttcaagaatagcttagagccaggtggtggttcatgcttttagtcccagcactcaggaggcagagacaggtgaatctctgggatagccaaagctacacagggaaaccctgtctcaaaacaaaacaaaacaaaacaaaacaaagagtggcttagaaaactagacacatcattctcaactacacagtgtattcaaaacgagcctaggaataggaagccctagctcacaaagcaaaatagggagaaaatatttggaggtggaggaggaggagcatggtataatcctagcactgagaggctgggccaggaggattgcaagtttaaggcaacatagtgcaatcccgatagtgcaattccatttcttaaacaaacgaagtagccagatactggtgatgcacagctttaatcccggcactcgggtggcagaggcaggtgggtctttgtgagttcgaggccagcctggtctatagaccaagttccagaactgccagagctgttatacaaagaaactctgtttgaacacctccatcaaaaaaaggaggaggcaaaggcaagcatatgtctgtgaattccagtaaaacctggtctacatagcaagttctaggtcagccagggctacacttggagggagaccctgtctccaaagaaacaagacaaaacaaaaaatgttggcatggatctttttctctccatacattttcatatagttgtttataaatcattggtcatgtcttttttttaacccatagctcttccttcctctcttcttcatactgtaaatttatatgtcaaatcagatcttagctaattgtggtggcatgtgtctataatctttgcacttgaggtcactgtttttaagccagcctaagattccctagcgagaccctgtctcaacaacaataggttaattaattaattaatgaaagatcagataataattcctgggatgcctcaaacattctaaatttgctaagtgtattatttcaatggtgatttaacatgctgctccaccaccactgccctggaattgaatcaataggcttgagcccatctaacagctgtgtgtttactaagcactgtgcttgttgccaagtgtcatacaacagtgactttaggtatcatttagaatatttgttccaagcaaagaaagttaagattcaaacaagaacctccagagagtagctaactatgctggcagctcagatcaaagagacactattcccagtacgttaagccaggaatgggaatgagggagggagagttttgtgaagacaatggcatttaactggacttggaagttgtttgcacactgacagaattttaatcaactggctgtgagaactggagttagtggctagtgagagtggaggctggtaacgggatgtagtaggttgggtgttggtacctaccaccacattacatcctagaaattgggaagatggctctggatgaaatctctgccttgcaagcgtgagggtgggatactgaggacctacacaaaagacacccaaggttatcttctggccttcacatgtacatgtacgtgtacatgcacatgcatctgcacacacgcgtgtcacacgtatgtgaacatgcaatactagtgtgcatatcacacacatacacgtaatagtcacattcaaattcgagaagcctatgaatgtttaattgtttgaaaaatacatcttagtaggtgtgcttaagctcaaggagaggagataacatgattttggaataatgggttggactctaagtccaatgacaaatgttcttataagagataaaagaggaaaagacacacagaggagacagcattgtgaagacaagtgtgtactggagtgatatagctgtcagccctgcatataggaagagatgaggagtggattcttccctatatactgtagggaccacaactcttccatacattgatttttaactgctgactaggagagtttttgctgttttaagccaccagttttgtggttacttattctaacagccatagagaactgacatagcaagttggggctagagtgttttatgatggaattgtctcttttactgccatagccctataaaaaccctagacaaagcaacattgtagctttttcttctcagggacccctctccacatactctcaaatttctctcttttctgtaaattttgttttgttttgttttctcaagacagggtttctctatatatagctttggaggctgtcctgggactcactctgtagctcaggctggcctcaaactcactatgtagctgagggtaactttgaacacctctttctactgtctctaccttccaaaaatcacaggtgtgggctgggcagtggtggcacacacctttaatcccagcactcaggaagcagaggcaggtggatctctgtgagttcgagaccagcctagtctacaagagctagttccaggacagtctccaaagccacagagaaaccctgtctaggaaccctccccgaccccaaaaaagaatcacaggtgtgcaccagccccacccctagctaaaattacaacttctttgaccaattgttgacaagttattgaatctcccttgacacagctcctcatctcagtgaagaatacccttttggggataaagcaaagattaatgaaagatgtatgtataataccaaatctacagtagagcttcaaaatgtgtcagtttctatccacagcctttattgaacctactactattgcactttcttatatagtacctccgttgtagggtttatcactaagctaatgaagtttaaactgacttcaggacccctcgtttgcacaggccccccaggctggggtgctaagaaagtaacagccagatactcagcaggcaatcaaacccaggtccctgtgagaaggcagaaccctcctggtgagctgcatccaaccctttcaactgatgctctaagatgactacctagtctgcattatgactagtgacttaaaggtccttggggccagtgagatgggtaaaggcacttgacaacctgagctcagtaattagaactcatgtaaatgtggaagacaagagaactgaatccaccacgttgtttgtccacacatgcaaatatcatacacacacaaaaataatttaaaaatttaaagggttttttttttttttggcttttcgagacagggtttctctgtgtagctttggagcctatcctggcactcgctctggagaccaggctggcctcgaattcacagagatgcacctgcctctgcctcccgagtgctgggattaaaggcatgcgccaccaacgcccggccgaatttaaagttaaaagttcttaaaaccatgccttatagttactatcaagaagttagcagatattggtacctgtttgcagtcaaagttaacctttagtcatgagaaagtgcaccgtggaaagaccccctgagtgtagacactgttctggggacagtgttctgcctagacagctgtgctgagctagtctagccttggaaggaagttcctcactgccttagggaagaccgagagcaggacaaggcggctgctgctgcctcagagcagagctctcatcctgttggaaagagttgagcaagccccagcagcagtctgtctcaggctaatgcagaaaatcccacaactggctgccttgggggcatcagttcatttatcttccggatgtagtcagacttttcttttctgcgcagcctttgcccatcattcccccccacccctcccccaggatcagcttcagctctttcacccggagcttcttcaggcccactgtgctcaggtcgatctgtttgtcgtgttttagctcacagatctggctgtctttcttcgtcagtttctcacagatcttctccgcgagatatggtgggccaggggcttcgatacctcattgatgatcgtggcggctgcatcatctgtggccccacaagcgattctctttgcctcttgcttcacggcagaactttacactgttcttcttcaatagtggctggtgaaaatgtgatatctctgtctttgacgtcctggtaaaaccttcccaggtaagaaatacaaacttcacagttgcccgcccggctgtgaggcagcatgctccagagccagcgctgccgccagcccccacgcgtggcccacatctcccctgcctccaccaccgctgccaccgcctccgtgcccatggcaactcttataaaggaaaacatttaactgagagactgcttgcagtttcagaggttcagtccattatcatcatgatggggagcacggtggcgtgcaggcagacatggtgctggagaggtagctgaaagtcctacaccgtgcaggcaacagaagtccactgactgtcacaccgagggaagcttgagaaagagacctcaaagtctgctcccacacctcctaatagtgccactccctttgggggccattttctttcaaaccaccaaatagttatgtttcttctctttgattattttgttcctgataaagtcttttgattcacccttgtcattgacccagcatatgctgtcttgtatagcattttggtgacccattcagggagcctctcttggtcacttcttactttttgtgtctgctgtggctggctgagcagtttggaggcagctgatggcctctggctgggactgcatgacagagtggcccagaaggaccacagtctaccagcgctttgtggggtacagactaaggagtagtcaaggtccctttggtggaagctgaagggagtggtaaggaaagatgattactacaggtcctaagggtaggataccacactgccttcctttcaggacctttctacttttgtcttgtggcatggttgtcactgacaccatgcccagggcaaatccacacacattgtgaggatttcctcgtccttgttccctctcacccttctttttgaattactacaagtaagcatattgttttgctttctccaggaagggaagcttcccattgccctcataactggtgagtggtcagttttggtttgtgagtctaccctccaggatcaccctggccttaataaccagactgggtctggagtgaaccatgtttcacttgtgtaaatcaagaatttctctatccttgggggatgccctgatttagagcgtgccttgattgaatcagtgcagtgagaccaggtctcactcctgatcgggaaggaaggtctgctactcactaggggtgtctttggagctgatattggtagggaccatagtaagtcctaagtactgtattccttctgactcatttctgggatgtagtttcaaatgccggtctaaatttgactttcaagtcctcaaaatgaattactttcttttctttttttgttttttgagacagggtttctctgtggctttggaggctgtcctggaactagctcttgtagaccagattggtctggaactcacagagatctgcctgcctctgcctcccgagtgctgggattaaataaaggcatgagccaccattgcctgacaaattacatttttttcataactcctctctctatgtatttcttctttacttgaagagatctccccaattcctcttccgtcttactcatcatactttcttcctcaaatacttacccaggaacttcatataaagaattcaggttaagtattagaagttaccccatttccctcagagaacaaatcgctaaaggtggcagggagtcttatgctgcctgatggaggagccgggaaccaacctaggtcctctgccagactatcaagcattctcagtcatgtctccaagccttttcttccttccttccttcctttctttcttttttttttttttttgagaaggggcctaatgtagaccaggctgaccttgaatttgctttgcaaccgtgaacctcaaacccttgatccttctacctctcaagcgctggaattacaggcatgtgttaacatgcccagctccagctcagcccttttgaagctcttcacagtaggctcttcctttatgcagatctgtctacatctccagcggtgatcaagtcacaggccctgccaccatgggttcctctgcctagggttaaaattgtcctacccacagaagctcaagcaccctgttactgtgagtcacttacagatctctgttttttctttggatgaaacctaggtccatcatacaccttcataaccctccagaccttcctaatgcaatagcaaagatgttttttttcacttgcgtttctgaattctatgatgtaatcttacaagctctctcttcctattcccttaggtttattatacaggactcaactcacttcaagaatttatcacagcaaggtgttggtggcgcatgcctttgatcccagcacatgggaggcagaggcaagtggatctttgtgattttaaggccagcctggtttactgagttccaggacagctatggctatacagagaaactcagtctcaaaaaaccaaaaaaaaaaaaaaaaaaaaaaggaaaaaagaaagaacttatcatatcatatatctgtttctccatggaaaagtacatatgtgaagaccagaggtcacaatgggtgtcttcctcagttatgcttctgtttttctgtttgttttgaaacaaaattactcactgaatgtggagcttactgttttggctacattagctgttgagccagttccagagatctaccatctcttagccttgatgtggctagactggctggctagtgagctccaggtatggatctttaatctgtctcccacccttgcactctggcagcagcggttacagacatgtatgtaccatacccgccaggctttttacatgggtgctggggatctgaactcaattctttacatgttcagcaagtgctttagctactaagccttctcctcaggttaatcagttaattttgaggcagtctctcacaatgtagtcttgactgacttgtaactctatgtatgtagatcaggatgggcttggactcagagatccacctgcctgtctgtctgagtgctggggttaaaggtgtgtacctccatgcttacccttagggtgaactcttaaacttcctagacttaggttaccaccttaaggtatgaccttcatctttactgctttactccaacattattgatgtcctttgctggatctaagactttctcatcctaacagtcactattaaactcctttgctatcttcctagaatcactctgggataccagctgtccttatttctctaccttaacattcttcaactcgcccacagaactactgggtggcaacattatactgaaggcctattcattgttattttgttctcactcctctgtctaaggaacagctcctccctcagaagtgtgtctcctttaaccttgttgagcaaaaaccttaaaatctcttaaaggagagagatcttcccacaacacatggaacctgtcttagggtaatttttctcctggagttcacagctttccaggctaagatttcaaatctttcaacggtcgtgacttccttgctgtgctgtctgtctcccccaccccatgattctccccacaacccccacaagatataaatagctagctgtccggtctgaccagcagagagaccttatactgtaaaggtggctttctgtaccaggccttttcttttaggccaccaaccagctcccaaatcatgacatggagacttattagttatgaatgctcggcctagcttaggcttatttctagctagctcttttaacttaaattaacatgtttctctttatctactttcgcctttttttttttctttataacttactttcatggggtccagaccagtctggtgaaacccacaaaaacagctgacctgaacatcagggaactcttgctccccagactgatacctgggataccagcatgggactgatccagaccccaggaacatgggtttcagtgaggaaacctacgggacctcctgtagtagttcattacttatccctagcataggtgtggactttgggagcccaatccatatacagggatactccctgagccaagacacaggggggtgggcctaggccctatcccaaaggatatgatagactctgatgacaccctgtggaaggcctcaccatccagggggagcagaaaggatatgtgataggtagggttttagttgggggtggtggtaggggaggacaggagggagagggaactgggattgtcatgtaaaacaatcttgtttctaattcaaataaaaaagccacagagaaaccctgtctcgaaaaacaaaaaaacaaaaacaaaaacaaatctgcaaagaaaaaaaataacttacttttacaacttcttatgtctgactggctggtggctacctgacttcttaccttgggcatgtcccttgttctttcctccttctctcattctgctcttgtttatttatgcaatgtgaagttttagtcctttaaggctatatagaataataaaaggatgtaggttaatagttaccaataattatcaaacttaaagtcatgttagttaggttttctatatatatagagatatgtttcaaatacataggtaaatcttcaaacacttcaaagacaatagaatatggcatttaaaatgttttaatggggctggagagatggctcagtggttaaaagcactcactgcttgttcttccaaaggtcctgcgttcaattcccagcaaccacaaggtggctcacaaccatctgtaatgagatctggtgccctctcctggcccgcaggcaacatgcagacagaacactgtacacataataaatcataataaataaataaatctttaaaaaaataaaatgttttaatgacttagtcttttctttacatgaggctgtctgttcctggcagcaccaatctgcttctaaagatgatgatgggcattgaagatactccatatggagtttgctttctttgtagcaaaagctggcctttagggcaagaaattgcctttgttctcaactactgacgtacactgtccacactggacaagcaggacacaaagaaaggtgactgctgaactttgccaagataggttagggcagttcttcaaaaaattctacttctaaaaaaggtctgttagatattccaggcctgtaggccaaagatggatgcatcaacattgcagaggaggaaccttgggggactgtccaggcagccagctgcttctgttatttcttacattttttttggaagtcactttgaaggaaccagcttccttttggcagccataacagccgaacacgtgcttgccataaacctgccttggtcacgtagaggtcagatgcctgtcttgtgacaaggaactaatcagaagttagctggtggcgctatgctttacgaccctgggtgtgctttacggacaagtgcacgacaatgacgtagagagcatagcaaccaccctgggagggnnnnnnnnnnnnnnnnnnnnnnnnnnnnnnnnnnnnnnnnnnnnnnnnnnnnnnnnnnnnnnnnnnnnnnnnnnnnnnnnnnnnnnnnnnnnnnnnnnnnnnnnnnnnnnnnnnnnnnnnnnnnnnnnnnnnnnnnnnnnnnnnnnnnnnnnnnnnnnnnnnnnnnnnnnnnnnnnnnnnnnnnnnnnnnnnnnnnnnnnnnnnnnnnnnnnnnnnnnnnnnnnnnnnnnnnnnnnnnnnnnnnnnnnnnnnnnnnnnnnnnnnnnnnnnnnnnnnnnnnnnnnnnnnnnnnnnnnnnnnnnnnnnnnnnnnnnnnnnnnnnnnnnnnnnnnnnnnnnnnnnnnnnnnnnnnnnnnnnnnnnnnnnnnnnnnnnnnnnnnnnnnnnnnnnnnnnnnnnnnnnnnnnnnnnnnnnnnnnnnnnnnnnnnnnnnnnnnnnnnnnnnnnnnnnnnnnnnnnnnnnnnnnnnnnnnnnnnnnnnnnnnnnnnnnnnnnnnnnnnnnnnnnnnnnnnnnnnnnnnnnnnnnnnnnnnnnnnnnnnnnnnnnnnnnnnnnnnnnnnnnnnnnnnnnnnnnnnnnnnnnnnnnnnnnnnnnnnnnnnnnnnnnnnnnnnnnnnnnnnnnnnnnnnnnnnnnnnnnnnnnnnnnnnnnnnnnnnnnnnnnnnnnnnnnnnnnnnnnnnnnnnnnnnnnnnnnnnnnnnnnnnnnnnnnnnnnnnnnnnnnnnnnnnnnnnnnnnnnnnnnnnnnnnnnnnnnnnnnnnnnnnnnnnnnnnnnnnnnnnnnnnnnnnnnnnnnnnnnnnnnnnnnnnnnnnnnnnnnnnnnnnnnnnnnnnnnnnnnnnnnnnnnnnnnnnnnnnnnnnnnnnnnnnnnnnnnnnnnnnnnnnnnnnnnnnnnnnnnnnnnnnnnnnnnnnnnnnnnnnnnnnnnnnnnnnnnnnnnnnnnnnnnnnnnnnnnnnnnnnnnnnnnnnnnnnnnnnnnnnnnnnnnnnnnnnnnnnnnnnnnnnnnnnnnnnnnnnnnnnnnnnnnnnnnnnnnnnnnnnnnnnnnnnnnnnnnnnnnnnnnnnnnnnnnnnnnnnnnnnnnnnnnnnnnnnnnnnnnnnnnnnnnnnnnnnnnnnnnnnnnnnnnnnnnnnnnnnnnnnnnnnnnnnnnnnnnnnnnnnnnnnnnnnnnnnnnnnnnnnnnnnnnnnnnnnnnnnnnnnnnnnnnnnnnnnnnnnnnnnnnnnnnnnnnnnnnnnnnnnnnnnnnnnnnnnnnnnnnnnnnnnnnnnnnnnnnnnnnnnnnnnnnnnnnnnnnnnnnnnnnnnnnnnnnnnnnnnnnnnnnnnnnnnnnnnnnnnnnnnnnnnnnnnnnnnnnnnnnnnnnnnnnnnnnnnnnnnnnnnnnnnnnnnnnnnnnnnnnnnnnnnnnnnnnnnnnnnnnnnnnnnnnnnnnnnnnnnnnnnnnnnnnnnnnnnnnnnnnnnnnnnnnnnnnnnnnnnnnnnnnnnnnnnnnnnnnnnnnnnnnnnnnnnnnnnnnnnnnnnnnnnnnnnnnnnnnnnnnnnnnnnnnnnnnnnnnnnnnnnnnnnnnnnnnnnnnnnnnnnnnnnnnnnnnnnnnnnnnnnnnnnnnnnnnnnnnnnnnnnnnnnnnnnnnnnggtgaaagacccgagctaacatagggttagctcgttaaattacaataaagcctcgtgcagtttgcagcaagctctcgaatccgcctgatgattggggtgacctcgaacctggcctgagaccccggatacttgagttttcgggggtctaacatgtgcacaccagaagatggcaccagatctcataacggatggttgtgagccaccatgtggttgctgggaattgaactcaggacctttggaagagcagtcagtgctcttaacctctgagccatctcttcagcccgataataattcttattgtatatagttttattatgttagaacctttccttcttaattagacaaaagggggttaatgttatgggtattctgtcactgctctgttagccaaatgaaaggagcatttttggtccagaggcagggttttcattgggaatggacatgactgaaagaaaagtcagggccgaggaatgcactggtcctttcaaaggagaacagctatggtgtaggcaagtagaggctggtgactcgggtcagattccccattttgtcttgtgatatttgtacatggattttgcttgattataaatggcaatcttgggggctggagagatggctcagtggttaagagcactggctgctcttccagaggtcctgagttcaattcccagcaaccacatgatggctcacaaccatccattatgagatctggtgccctcttctggtgtgcagatatatatggaagcagaatgttgtatacataataaaatatttaaaaaaaataaaataaaataaatggcaatcttttgacatcctttatcaggaatggactgttttgtcagtcctatatactttatgcaatcaaattttttttttttatggtgaagtgaccagccccctgctttagcagtcatgacaggctacaggaaagactcaatatgtgctcgcctgaccttgctgggcctgccccagtcactaggaggtcagataccctccctgtggcaaggaaccaatgagaagttagctgacagggctgtgatttatggctctgggtgtgcttcgcagtacaaacacacaacagtaatgttcagagcatagaaactgccctgggagggcctatgggccataacaaccagttgaccaatcaactcaagacaggtggtccaagcctggaagtgcaccaatcctgagactgttgtgtaccctctagacactccccttgctctacccaatataatctgcccccttgtggtttctcgaggtccttctccaagcatcagctggatgaacagatgaagagccctagctaatggggttagcttgctaaacaacaacaataaaagactctttgcttttgcatagaaatgggtcttctggtgattttggggtttcagaatttgggcacaacaatggggctccaatattggtgtttctggatggaagccatatgataaacagtatattgatatttcctatactgcttctgtcaacttatgctgagacaacaatgctaaacataactaaacttttttgttttgtttttttcaagataggctttctctgtgtggctttggagactgatctggtacttgctctgtagaccaggctggcctggaactgacagatccacctgcctcagcctcccgagtgctgggattaaaggtgtgagccaccaacgcccatcatataactaaacttcttaatgattctttttggccttttaatactatcaaagataaatatttaacagtaggcgagaccactgacattctgataaatgtaacatgggcccctgacatggctctccaggtggggttgttccctccaaactgatggtctgggtttgattcccaggacctgccaggtgggacctgactccctggaattctcttctgacttctccatgtttactttagggaagacatcacacacacacacacacacacacacacacacacacacacacacacacacggggtggggcgaggggaaatcttaaaaaaaaaacaaaaaacaactaactgtagtttcatctataaccacttttatcttgatttttgggaacctggactgtcaggcacctcataattgatctcctacccagaaatctgtattgatgactacttctctggttggtgccaggccaaaagatttcattggggcctctgggatccttccattgtcatcagctgctgacatggctaggtcctgtggccagccactggagtaagccttaaggaggtggactactattttctactcagaaccaattagtgctagtcctctccactgagtggggttactgctatacaaatgctggctgccattttacaacctaagttcctttctgaaaaaggcactcttgccttcacacccttgctccaaaatgtagcaaaaatcaagtcccaaatgcctgatattcctgtcggggtgcaccatgtagtgcaggttaatttaaagaaggcaccccaagatgaaattttagggcctgtgtggcagcaggaaggtccagcctctctgatggacggaatccccccccccccaacagccatacagtatttattgttacccaaagtatttcctcataccaatgtccctaatctaattttcatgtcttactaaaggagagccctcaggactctagtcctttattatgtgtcattcccaatacacaataatgcaagagcttcaggtgcacctcagtgtcttgtgaccaaagcgatgggatggctgcaatgcctcttcagctaaacaattctacaaatcacagaaaataatcagggtttgccacaaggactcttcaaggtcaaagtacttctaaagaaaaaaaaagcaaacaaacaaacaaacaaacaaaaaaaacagctgttcattctaatgtctaccccagataaagtgactcttgctaaattcctacaacctattccacaattcacaatttggatcactagccacaaactatcgagttttagaacagagaactaattgataactctggccaatactcagattttcctgctctattctaagaagactttttggaaaattagaatttcaactgtagagatggatattaaaattatctcttatctgaccatctagaaggcacccgtagtcgctttagaggcacaatgaagcctcaatttcctagcagaaatgaagtccaaatccataatgtctctgggagcgctgggtctttccagtgtatttcctttccataaaaaaaaaaaaaatattgtgtgaggtcagaggacaactttgtgtaaatcagttatctgcttttacctttatatgggtcccagggattgaactcaggtcagcaggctggcacagcaagcacctttacccacagagccaccttgctggcccttgtagtacaccctctctcccagggtctcatgtgtactgggctcaaactcagtaagttgccaaaggttatcttgaatttctgatcctctcatttctgcttggattggatgatatgcatgtaccaccacacaaggctttattgcagtgttagggatccaacccagggcttcgcgaatgctagggaaatgctatatcgactaagctatgtccccagcctctgcaatatcttctttttcttcttcttcttctttttttctttcttcttcttcttcgagtcggggtttctctgtgtagctttggagtctgtcctggaactttctgttgaccaggctggtctggaaatcacagagatcccctctgcctctttttcctctttttcctctttttccactgcccagcttgcaatgtatttcagtaaatattctgcttgcttacttttatgatcttggtaaatcttttttgcccatctgtatctccagcccttcacacacgggcttccaacgcacactatatctcagagagcacctacttccattgtatttttatttttagcaataataggagtcagaaccctgtgtttggctacaatgttttatccgctatatcagacacctaaaagtagttaagctggggatatacagccgctgccgcgcaccgattctgagctgtgttaaaattcctattcataaacactataaggctatctttggatgcaaagtaccaagaagtcagtcaccagggagaaaagccatggctttaaagagtaatgaccttttgaggccagactggtttacatagcaagttccagaccagctagggctgcgtagtgagagccggactcaggagaaaagaaaaaggaataccctaagtccactggcagtctaagtagcagcgttagctagcagtggtttccccctctgggctggtacgtggagcacaccgataatcccagctcttgggaggacggcagctcaaggtcatcatcctcagtcacacagtaaactagacgcctgcctgcagtcatgagtccctaggtttcctctttggatttggaagtctacagatgccttgttttgctgagccctgccctggctcgtaggacccccagagatctgaattgtcctcactccctaacccgacaggtctccaagcatccctgcttccgcagtccgcgttccttccgcgctctagagggagcccgcgggcccagcttcggcagcggatacgtttcggaggggtagccgcctgggaggacttcgctccagcacctgctgggccgcggtcctgcctggggacataccgccgtgtgcgccctccccaagacctagccaggcaaccctcggcctcagcggcgcgccgggccggggtggagccgggctgggaccctgagggcctaccaagggttaggtgctggcgctctgaggttcggggccagaaccgcgacccacctgccagccagcctcggcccggcctgccgccgtccccctcccgcccggctccgcgtaaaacccggagcggaggccggtccccggctccctagaggcggcgcggcgcggccgactgggcatgcgcaatgcgcagggccggctcccagcgccaaaaggaagcgttcgccgagatcgcagcggctgcgccggggtatgcggaacgggctcgcgtggctgctgcaccccgcgctcaccagcaccttgcgctccatcctcggcgcccgcccgccgcccgccgcgaagcgacagtgtgggtaagcaccccgagcgccggggccctcgcggcccgcgggtcaccgcggcggtgctgtgtgctgctgcaaagtggtgattcagcacttagcgccgccgccgccgcccctcacgctgccagtccggcccgccgggtgcgtggacgcccgcgccgaggccgtccccggggaccgggaagggtcgggcctggcggggagggaggacccggacggtgccctgggatcgttgggcggacgccacaagtgtagaggggccccggggccgtcttaggctgcccggccgcaacgggagccgcgcactccggctgccctccgagagcggccggccacctgagccgggccccggtgccacgaggtgaggggatccggtgagccgtgggagaccgctcctcatcctgcagcgctgtccccccccgagggggccgagtttcccggactagggcaatgagcgttgggtactgtaaaagtttgcctgcctcattgggactggacagggggatttgggagcccaaagataccttgggatcctgcatagcatctgcccggtttcacgcctaaaacagcacaggttcagagagattttagtggtttctcttacagagattgcagagattatggcaaggatgcactttttgtttgttttggttttttttgtttttgttttttccccagttagtggcgtactccctccactttacccctctctttgtatactacaaattttcagtctcgtaaaggtgtaaggtgctttttaaccgtgagtcaagagagataggcagtattatcttgctctacatagatcattatttgaaaccctcctgattttactgatagttaggacctgccgaatgcagcgccctatgatgatgggctttgtgctcatatgtgacctgcctttcagtcaactaggatttggctggaaccatttgacaagcgctgagcttgacagtggacagtcaggaacacagtgatgggttaggggatctggactgctctttgaagtcatggaatctgggcctgtgtggatgtaatccaggccaggtgtactggtagtttgttggggatagtgaacagattagttggcgctttgggaaatttccctggggcaattaaaaaggcacagatgctgtataatgctaccctgggccttgaattgtagttgggatccccttgctcccggaatctttgattaatagtgaaaattagggtctcattaagagtttcgaattagatggtgttgcataggtgtgtaatcccagttacttggagactgaggcaagaggattgtaattcaaggcctgcagagggagttccaggtcagcctgggcaacccaggagatgctctttaaaaataaaaaaataaaacagggctggggatatagcttagtgacaaatctcttgcatgtcttacttgtgcatggggccctcggttcaatccccagtactcttttttccttccccccaaaagttaacgggggggggggcagtgatctaatggaactgggagtttaggagatttgatgggtgtaaagatttctgtaggatgtaagggagtagagaccgaaggcagagaaccgtgcctgccgggcctagtctttgctgcttggactatgaaggtagcagggttattaggagagacaatgaggaatttatggaacttgttttccctccctttatttcccgctgcactataaagtccattacagtgtgggaaaaaaaaatccctgggagagagaaatgggtgtggtaagcatgagtttggtacctcctttagcttcccaagttctggaattatgggcatgtactactactgtacatggcttctagaattgaaaaaaattaagacaaattgttattaaatatatatgtgtgtatatatgtggatacacacacacacacacacatttttcatactggtgtttttggaatcctcttgtctcaacctcttgagtgctgcgattatagacaactttaagttttttttatttttttttttaaataaagacaggacctcatgtccaggttagccctgaactccttacctagccaaggatgaactcctacctctatctccaggttctggaattatctgtaagtactgccatacctggtttatgcagtgctaggagtaaaggaacctgggctagttgggttttaccaaacaagttccttcccagccttgcttgtatttgtgagacaaggtcttactacatagccctgattggtgtggaacttggaacttttacataacctgggcttgcctcaaatttgtggtgatctttgtgcttctggggttataggcatgctcgctcacccatgctgagctaaaatttgtggttttaaagggagcatctattttaagttttatttatctatttatttatcaatgtatctattttcagttttttttaaagatttatttattaatgtattttatgtacatgattgctctatcttaatgcacactagaagagggcatcagatctcattacagatggttgtgagccaccatgtggttgctgggaattgagcttggaacctctggaagagcagacagtgcccttagcctctgcgccacccctccagccctattttcagtttttcaagacagggtttcttgtgtagccctggttgacctggaacaggctatcctcaaactcagagatcgacctgcctctctgcctctctcgtgctgggattaaaggtgtgtgccacaattgtctggttcattttaagttatagatggtttgtatattctacctactcctcctgcaattaattagttaagtattgttttgttgttattttgaaacacagagatcttccctgaggctggagaggtggctcagagatttaagaacacttgttgctcttgcacaggacccaggtttggttttcagcacctggtgtgagacacccatagtgtgtcttagttagggtgtctgttgctgtgaataggccccatgaccacagcaactcttataaaggaaacatttaattgaggtggcagcttacagttcagaggttcatttcactgtcatgatggggagcatgggggcatggcagtgtgcaggcagatgtggtgctggctacatcttggttagaaggcaacaggaagtggactggggtactgggagggcttgggcatatgagagctcaaagcccacccccacagtgacacacttcctccaacaaggtggtacctattccaacaaagccacccctcttaatagtgccactccctatgagcttatgaggaccagttacattcaaactaccccaccacctcacaaccatccataactccttttccaggggatctgatgctctctttgggcctttaaaatcatcatgcgcccagatggtacacatatatacaggcaaagcacacacacaataaaatgaataaattgaataaaaattaaatataatgtgcaccattatgccagccctaattatttttaaacattttttgtttgttttttgagacagggtttctctgtggctttggaggttgtcctttggaactagctcttgtagaccaggctggtctcgaactccacctgcctttgcctcccgagtgctgggattaaaggcgagagccaccaatgcccggcaaacatttttattttttacctgtatgacaagtgcactgtgtgtatgcccacagaggccagaagagggcaccagatctcacggaactggagttacgatggttgtaagctgctgtgtgagtgctgggaaacactcaggtcctctgtaagagcagcaagtattcctaactgcagagccttctttccagtccgtgtgtgtgtgtgtgtgtgtgtgtgtgtgtgtgtgtgtgtgtgtgtgtgtgtgtgtgtgtgtgtttgtgccagaagaggggatcacatcccctagagctagagttataggcaggcagtttgtgagccaccagacactgatctcaggtcctttggaatagtggcaagtgctcttaaccaataagccatcttgtcagcccttggtttatttatttttgagacagggcctcttgtaggccaggctgtttttcctgcctcttcctcccaagtgggagattaatgatagggcatgcaccactgtgtccagcctttgtgtattttacttgtaatactgctgctgtgtctttcattgatgaagtccagggcattgataaatcagagattcttgttaaggatctcagagaaggcaaattcagaaggctcagaacttaatgaagtcaactatctagaaaagctatacataaaaatgagtgactgaggctatggaaaggtcagatctaatcaaactaattggagcatagttttaggaagggaagtattgatgtctgaagctaccatatgttccaatctttattttatttaaaaacgttactgcatatttatgagttttttgcctgcatgcctggtactggggtcagaagagggtgtcagatcccctggaactggagttagggctgattgtgagctaccatgtgggtgctgggaattgggtccttgggaagagcagccagtgcttttaacccttgagctctacattcagatcttagggaagttagttttactgtacatagcaagaagaatgcttaacagagttagtcacttggaagaacaggtgagagcctgttacaaccagtcaggttataagcccttgccagtgtttgagcatttgttttgtggtctaacctctcaacaaagagatgtgtaagataattcatttaaaaaagaagtccagtgagatggcgtagtgggtaaaggtgccagttgccaagcctgatgacctgagtttgatctccagcacccacatggtagaaggttagaactctctcctgtgagctctcctctgacttcgacacaagtgcttggtacatacatacatgaatatatctgcacacaaaataaatgatgtaagcttcttaaggtttttaaacaaataaagaatgagtaaataaaaatcagttttctgaatagctgtagtggatattgggactgtggaattattttaactactggggacctagaagtaatactctatcctcggcaatcacttgagacatggcatcagtcaaccttgctgttggctcttctctgtgattctctattccacatgcttaggaaacagttgtgtaccactctggattgactgactgttaagctgttcagaccttttagggcttggggatggggtatagctctgtcagtggtaaagtgcttgcctgtaacacacaaagccttgggaaacaattcaggcttttttgtttgtttgttttggtttttttctgtggcttcgaaggctgtcctggagtagctcttgtagaccaggctggtctccaactcacagagatcagcctgcctctgtctcctgagtgctgggattaaaggtgtgcaccacccaccagcatgattcaggcttttaaatcatttttaaccagacaaatgcctgttaatagtttagaaagacagattatccttgagtatcctcaacatcagcctgcaaaataaaaagttgtgttctgcccatctgccctaaaagtcagggcacattgcaatctcagcagagtgtggggtaagagtgggaattctttgtataagtttcatgaaaattgcttctctttctgttttactgcttgtattttagctttcttaggcacacacccagagaaccggcctatcttccagccaggctactaaggctaggacactttctttctatagtggtaggtctcctaggactctggaaccttcactagggccttcagttggcttgccttttgtctgcccttattgttttctgcttgtttggccattatttgtgctcattaattgagtatctatattgtttgattgtccactgtgctcagtattgtaagggttgcagagataattcgtcataaatcctgtcccccaggagctttcagtcataaataatggataattatattcctttctttgcttctgttattttattaaacatctctacttttatgctttgtggcttcttccaattaattttaaaatatttaatttttttttcatttcttaaattcacgtgtctggggcttggagagatggctcaacagttaagagtactggctgatcttctagaggacctgggtttaagtcccaatacccgcatggcagctcacaactgtctgtaactccagttccaggggatctaacaccctcacagacatacatgcattacaaacaccaatgcatataaaataaaaataaataaatcatttaaaaaagattgcatctggggctttggagagatggttcagtggttaagagcaatggctgctcttccagaggtcccaagtgcaattcccagcaactacaaccagctttaatggctggttgtatggcagtatcctcttgtggtgtgcaggtgtacatgctaagtacccatatattataaataagtaaatcattaaaaactacaacaaaaaagattgcatctgttttcttcctttcaaagtagaattcacaaaattctttaaaaatttttatgtatatgtggttttgtttgtatgtgtggaagtcagaggacaaatatgtggagtttatctctccttccacctttatatggggagtccagtaattgaactcaggtcctcaggctctgagccgtgtgactgatgccacaaaattctttgtttaaaaaaattttttgagacagggtctcactgtgtagttctggctgtcctgtacctcactatgttggcgaggctggccttgaatttacagaggtcctcctgctcctggctcccaagtgcttccaccatgcccagtatttttatttttaattgtatgtacatatgtgtgtatgtacatgtgagcacagtgtctttggaagccaaaaaggatgttgggtccccttggagctggagttataggtggttgtgagccactgtgttctggtggcatgtctctaatctcagtacttcagaggcagagggcagagaatggggagtctgagggtagcctgagatacaagtgataccttttatccaaataaataaataaaattaaattagaactttactcatttccaagacttctcttctttgtctattgaaagtgtatctgcattaaatttttttttttacacacaaagacaatggctttctttctttctttctttctttctttctttctttctttctttctttctttcttcctttctttttgagaaattgtctaattctaccttagtctggcctagagcttactgtgaagctcagtcttgtacgtggctttttctgtcctgcctgccagctcccaaataaccacagggaggcttcttatgaaattatgaaagctcagcctatggcttaggcttgcttctaacaacttcttgtaacttaagttaaccctgaatttttcttcatgtttgtgttgcccccagacttgtttacctcatttgcatattgtccatcctgctgtcctactttttccagggtcctctgtgcctggaaatcctgcctagctattggctgttcagttttatattaaaccaaacatagtgacacttcttcacaatgtataaaagattattccacaacatttccccctttttgtctaaataaaaaggaaaggtcttaactctaacatagtaaaactatatgcaataagaataattatcaggtagaattacattcataatatccagtccacttgtgtttggtaaactcagagaaagtactatattattaagcctatcttagtttaaggttttatattgaaaccactttctatcataacttatattaccattctaaacagtatatttttagactttaaaacatcttaaacaacttaagctcttatgtttctcaaccttataaactttatatctcatatgtaagattttttttctgaggtggtaacaaggaaaactgtcaaactatatctagtcttcaaccctatcaaagatctgagaaggatataatagtacctgagtaaacaggaagtgtacaacaaacaacttctgaaactacagaaatgacaaacatctggctgcctagacagttactcaagactcctctgcgacgttggggcatccatcttcagcttacaagcctagaatatttgatagacttttctgtgaagcaggaattttgaaggactatcctaccttgtcttggcaaaatttggtagttgctttcttttgtgtcctgcttgtccagtttggacagcatactatcagcagttgaggcaaggacagtttcttgcccagtggctaacttgctacaaagaaaacaaactccatatggactttcttcaatggccatcatcttatctgaaatagattggtgttgccatgagcagacatgcctcattatcattttaaatgacatagtctataggtctttgaagtgtttgaagaccatcttctatctatttaaaaatatctatgtatggtcttgaaaacatatctaacatgactataagtttgatagctatagatgactgttaatctgtacttattatcttaaatagctttcaaaaactaaaactttacataacctttttaaaataagctgcataggtacaataccttaaacaagaatagaaacatatgtacagtataacaaaaataaccttaaatttgtatcagtatacaaaaatccataccattgtaaaatatttgagactagcagttgtttaaacgtaggctcaacagctgggcggtggtggtacatacctttaatcccagcattcgggaggcaaaggcagagtgtgttccaggacagccagggctacacagggacaccctgtctcaactcccccccccaaccccctcccaaagtaggctcaaaaatccaccctttatcttagcatttctatacaataacccccttttttcttcagaaagaagacccttgaatctaactcctttgtttagcttttttactgaccataactaatagcaagttgtaatcaactcttctaaatgatgacaaacatctataacccattgaatgatcaaaagctatccaacccacctcttgggaatgtggatgtcatttgcactctttatcccctgctgatggagatctggaagggtttctttgagaacacagggtgtgaacaaagtataaaatttggacaaatggggtatagttaataaatagacttatacatagaagacatgggattagcaaaggctaaaagaaataggaaaactcatatcattgagagacagaatatttttatcccataggaagtaaaaatacatcactttcagtgatgacatgatatatggaaactaatctctttggtttttagaaacacaatttgaaattcaagtagacatcaaagtagtacaaatagggcctagtgtaccctagttggtggagggcttgcttatcatgcttgaggtcctggtttgatcctggtactgggtggggtggagttagggatggatgaatatgaatggagctaggtgcagtggcacccacctgtagtcccagctactttgatgggtgaggtatgaggatacttgagttcaggaattctaggctggggtgggctacatagtcacttggaagtgtaaatgacagggataaggagactcattagatgatttgtgaaagaagatccaggagcctctaacagctccaggctgtttgagcatgtaggggtggagcccaaagtcttagaattaatgactttaaaatgagtgctgcgtgagctagactaggagggaattagagcagagcagacatgagggactgagctgcaaactgtgggaagaaggccattcaggtgagatgttggtcctgtctggcaggtggctggtttccccaaggcatgccaagggaacaggttggtcaggtacagcagtggagcacagtggcagtcttgtaggcacttcagagctgccttttgctgtcaggaagttggatgactcagggcttcttaggatagtggatgggactgaacagtccttgatcacataggaggggaaataaaatgaaggtctagttcatacatgcgtagtaggggaagggttcagttaaaaggtcaaagttaggttggtgagttctgagctactgctatggttccttttctttttgtttttaaatattttatttatttatttatttacttatttatttattatgtatacaatatttgcttgtatatatctctgcaggccagaggagggcaccaaatctcatagatagctgtgagccaccatgtggttgctgggaattgaactcagaacttctggaagagcaggcagtgcttttaacctctgatccatctctccagccctgctatggtttcttaaattccttctgctcaaggttcagaaatggattagaaaaccctaaataagactgacctcagatgtaagtgaaatagatccagctgttaggctcttgctgtttttagaaatgtttttgtttttctccactgtttctctgtatagctctagctgttccagaactcatgcaatagattatagatcaggctggcctcgaactcagagatgcatctgcctctgcctcccaaatgctgggattaaaggcgtgcgccaccacagcccaggtaatgttaaccagaaaggcttagcggtcaatatttattgagtgccttttatacactatgcatttccatatgtttagtggccataggagttctgcaacagagtagtgctattaatcttccttttctgtatgaggagattgatgctcaatggggttaaattgttcagtgatacacagtaagtggcttggccagaaatgaattcagttgggctcattcaggaaccttagggattagctgttattgcataacttccttgaagatagcctggcatctttagtggagatggggaagccagtaagggaggtagtttcggaaagcatatgcaaagtggtgttgagtctaaagcaattgatagtcaaggggagacttgctggaaccctttgaagtgtgactggactttggtttagaatgtctaaactgttttttgtttctttgtttttttggtttttcgagacagggtttctttctctgtgtaactttggagcctatcctggcactcgctctggagaccaggctgtcctgaaactcacagagatccgcctgcctctgcctcccgagtgctgggattaaaggcgtgcaccaccaatgcccaggtgttttcttagattggataaagagttcagagagtggacatgcgtggttatacagaaactatatatgtagagatgtagatggtacatgacctggtgagatgctgacatttagagatgcagaggaaatacatttggagagcttgggagttcaaagaacacaaggtggtatcagaagttgaatggttggatgtgcttagtcaaaaaggttgtgagcagaaatgtgatattgagaaaagataaaagaccattttgggggctggagagatggctcagaggttaagagcagtggctgctcttcctagaggtcctgagttcaattcccagcaaccacatggtggctaaaaaccatctatgagatctggtgccctcttctggtgtgcaggcagaacactgtctacatagtaaataaatctttaaaaaaaaaaaaaaagagcattttgttggccgtctacaaacagtaaaggatagaagccaagtttcttagggtccaacacaattattctgaaaagcaaaaaatgaggtattaagtttggaaaaatcagacatatggggaaaaagcaggcccaagcaaaaacaaggagagtaaaggtatctgtaagtggcttaaaggaagaagctagtggagaataaaagcctaggaaaaagaatgggagaagagggagaggggataggagggtagaagttaaaaaaaaaagttagcattatattcaaataataatgagaaacggttgcagggtgtggtgactcaagcctgtaatcccagcaattaggaggtggaggaagaaggagtttgagtggagaccagcctggcctatgtgagaccatgtctcatgtctcaaactagagcgggggaagagggagggatagatagccagggctttctaagttctgccatttttctcatgctgccctgtattccagcagccagtgtgttttatggaatgctaccagtcctggctcctgctgtgagcctgatgcttactcagctcagccttgtagcatatctggtttggggactagctccaaagggacaaggctcacctctagtgtatctcacctgtaggtggctattaaggatttgtaatgtgtctgtctagagtccttacttgtcccatgctgggttgttccagttctgggtgttctgaattagaagagtcccattcattcattcattcattcattcattcattcatttaattagttttagtaagtcagagagagttcttatgtagttctgcctggctttgtattttctatgtagcccaggctgactttcaatcctgaagtcttcctgcctcagccttcccagtctagggatcctaagtgtgagcctccacacgtagcttgtattggaaaatttccaggagtgttctcactgggctcttggttcacctatcggtgctggctcctcagccacacagttgcctctcattggcagctgctttcctgctacctcaattttatctggcccttagagcctcctcctgacttgcttgtggtgaaggttcaggatgttggaaatgagtctgtgggatgctacattatttagtccctgacgtcactgagcacacagtttgggtctgagggctcttggctctcgagctggtcattatcttcgtcacggtgctgcttgcagaggcaggtagtttttctttggggcctgtggaagaatccgatgccattgtaaatgagcatcttccgtagaggaaggaggaagagaggcaccagctgacatttacaaggttgtgcaatttgtgtcggcttgtaaagtttgggtttagtagtcagtccccagaatgtgatgcctcaggcacagagtctttggggaaaagctggacctatattcatgttgttgaataggaaaaaggagaaataagaggtggactgtaagataggccaaggttttgaaagactagtttttccgctgtggagtgctaaagagtgaacccatggtcaagtactgtgtcaccaagctacgtccccagctgagaaatgagtttctcagttctgtgttactataaatctttccaccaaacccacccgagccctactgccttgtgggcggtctccgcaagccgcctgagttctgcccaccgcgtggatggacaaaataatacagagacttatattaggtacaaatgctgcttggccagtgactaggatttctcatctgctagctcagtgttaattatcataaatctaatattttataagacttatagaggatgccttacgctggcgccctctcttgcctgtggctcacatggtgctgctggaggatgcgaaggggaaaaggggacacttcctgtttctccttcgcttaaatatgagtctccttgctatgtcatttcctgtctggatcaccacgtctctactacatttcccagaatcctctttgactcctagtcctgcctaacttgctgcctcattggccaaacagtattttatttatcatccagtaagacaaacacatacacagaagcacttcccccatcagttctgtttttcagaatggtgactatagttaataatgtagtgtatgtttcaaaattgctgagaaagtaaaattcaaatgtttttacctcaaaataataaatatgtgaggtaacatattaatttaatcattccactgtgtatgcatatgtgaaaataccacattgtacctagaggaacaaataaagaaagagagggaaggaaggagaaaattaacattggtacactactgccacgcaaacctcaggcctttcagattaatcagtagctccagagatcctaaaagaagacattcagctcttttttgttgttgttgtttgtttggtttttggtttttggagacagggtttcctctgtggctttggaggctgtcctggaagtagctcttgtagaccaggctggtctcgaactcacagagatccacctgcttctgcctcccaagtgctgggattaaaggcgtgtgccaccaacgcccgactgacattcagctcttttgttgtggctctttttagtctttgacaggaatagttccatagtctttgcttacctttttcgaccttgactctggggtttacacgccttgtagaatgtctctatttcgagtttacatacttctcctgtgttttaagtataggttttccagctcccagagactaccacagggctgatatcagtgctctcattgtgtgctggcaaatggtatctggagttcattggtctctttactgatacttttattaggtttgttattttactccgagacagggtttctctgtataaccctggctgtctatagaccagaccaaccttgaactcagaaacctgcccgccttgcctccctagggctggtattaaaagtgtgctactactgcctcgcttacttttatcaatttaacagttcatcctagctagccttatttgtttataaagttattttttccatttgttatgttttggggacctacttaaaacttactaaatacatttttaaaaccaaactgttacttttatttgtttgttttttgtagctcaggctggctctgtgtgtgtgtgtgtatgtggtatgtgtgtgtgtccacttgagtgcctgtgtggaggccaaaagttgatgttgaacattgtccttaattgttctcaactttttttttttttttttttttgagacagggtctcacttaatgtggagatttctgattcagcttgactgtctaggcagagagctctaggaatctgccatgcctggcttttatgtgggtgtccttgtgcttacacagcaggcactttacctactaaaccttcttctcagccttggtcttgatttatgatcctcccgtctcagccttccgagtgctactattgtaggaatgtgccatccatgctctactttgttcctcttgttcatctttcagtgtagatttatgatatgctgctttgcacagtggtttgcttgtgtgtgtgtgttcgaatgttcgcgtgtgtgtgcgcgtgcgtgtgtacataagttgtggacgtgcgcgtgtatagtgtggaggctggaggtcaacataagatgtattcctccattgctcgtcaacttaccttttgagatgtgatatctcattgaatctgaggagcatacacttgcttcccaagagtggctgggctgtaagctccagggaccctcctgcctctccaatactaggattctaggtacatgcctccatgcccagttttgtcatgtggatgcttgggatctaaactcagcccctcatgcttgcaagcaaacattttatcaaatgagatgtctctccagatgcacatagaggtttctgtctaagccttgttgttttctgaaacaggggcttatcctcgagtctctgccttctgagtcaccatgcctggttagctttaattcattactgttactatttaatgtaattttactgttttaaattcgggcactgggagtctgaatgcttgcttctatccattgaatgtctgatcattctgttatcacgttattattttttggtccctaagattttcaggtttatttgttactttgatattctagtcatggaattgaccatttctccaaggagtcacggctgtttttagtggagaagccaaagttagaaggcaagtttgtggtgctgtgtgcactctttgctacttaggaagggaagaaccagggccccagtcctcttagtggacaggacgaaggtaggaggtttatgtatacaaataaataggtatcttatcttatatgtggatacataaatgtgcctgtatgtgtttatttatgtacatgtatatgtatttaagtgtataaatagaaacatacacatacagacatgtttacatctgtttttatttctgtatctgcctgtatattgaaagctgcaagatcacatagacagccccagtgaattacaaggataatttgggcttttattctttgcatatttgtaactcttttccctgctgtgaggaccctggttctcattgacctacataaccctcatttactgtaccccgcctcagtgtgaccaacacctatctcatccctgctgacacatccttgcctgtgaagttgctcctccggctcttgtcactccacaccgccagtgaaggattgccctgtttattcataaccattgagctttggcagacatttgcagctgttgttgcaagttctccttggatacacctctgcacctgactcaagttttgtctcctgttgggctgcaaagatgggggtgctgcccttgttctgcccagggacgcagctattataaggctccagttccttattttaaacactcttcccaggcagtggtggcacatgcctttaacccaagaactcagaaggcagaagctggtgtatacctgtgagtttgaggccagcctggtctacagtgcaagttccaggacagccagggtctacacagagaaaccctgtcttgaaaaatcaacagggaatgaagaaaggaaggagggaggggggagggagggagggaggaagggaggaggagggagggaaagagggagggagggagggaggaaggaaggaaggaaggaaggaaggaaggaaggaaggaaggaaggaaggaaggaagttgaaaatagagttcaggataagtcctaactctgcatgctgtctgtataattcagggtgcagactgaagaaagatgggtatccttgaaacattagtattagtatcttgctttttttcccccttctgtttattaaccttgctgtgatatggacagtcctagttagcaaaaacaagttcatttggggctgtataaattcagggagcagagaatagtgccttcaagtacagtaagcctggcttttgaaagattgtgttctataaggaaaagtacacagtaaagatgacctgctatcccgttacccacaggtacccatcctaggactgtatagtttattggtaagttagataagcgacttgatgtctaaagatttggatttgattcccagtgcttctgtctaaagcctttagccaagtaacttccctgaggtctcatttcccaggctctatccaattggttcattggatgtatgtcctttaaaaagcgtgtgtgctgtacaagatcctgactgaacagtacatgcttctaagggcacagtgcatctttttaaggttcacctctgtatttgtgccccagattgctcattccaggacaaggttcctatagatcttttttcctctaaccttcaaagtcagttttcttccttttcttttaagccttttctggttcagatataggtaggtagaatggagtttatgatagtttatgcattttgatgaagctgtctcctggttgtaagtgtatagaattggatgtaataattctcattcattgttttggggataataaagcagaactgtaaaggagtcttccatcctcagcgttgttgacattgtgagcctggtggccctttactgtggagctgtcatgtgcactgcaggatgcttgcagcacccctggcctcagtactcttcatttgtgacagtcaaaaatgtctgggagtgggggtgaaattgtcaactgccgaaaactactggctataaataaatattgcctccctaatagcaattatacaagaatacttagttacctgctttcttgatagtctttccgatgatgttttggtctctggagatgatggtatacaatcggaatttcacgagcctgtagtaagaatgccagtaataacagagtgattactgaggcagcctgtttgcatctcacccttacaggaccacaataacaaagatgattctaataataaggctgccatttgttgattgttcatatgtgctgggcagtgccctaatgaagtttagttaaacagattttactggagaaaacctgtgaaatctgcccaagtctgatgcagcatgtctcggttcatttaataaccggagtgaacattttgactcttgagatgagaaagtccaattccaagagagtccagtaggaactcagatcagaggaacaaagagaccatttgttaatgacaaaatatgactactaagccgtggtcagtgggtttttcctaaccagcattatctgaggtgagaagattgtcttgtgtccaaaccagggtggtcgtagctcttgagcaacatcctctgtacagaatatgagcatttatgatttgccttccttggagggctgttttgacagagttagatacaggccactaactgatttggatctatctttaagctgcctttgctattttgggttcatgaaacatctgtaagaaaggtactccatgtatacatgtgaagtgtgaatttaaagaaatataactagatgatattctcttaaaaataaagaatctgcataattttttgagccagggtttctctgtgtaaatctagctgtcttggaacttgctctgtagaccaggctggcatcaactcacctgcctctgcgtcctgagtgagtgcctggactaaaagtaatgcacccgatgcctatgcatcctgagtgagtgcctgaactaaaagtaatgcaccctgatgcctctgcgtcctgagtgagtgcctgaactaaaagtaatgcacctgatgcctctgcgttctgagtgagtgcctggactaaaagtaatgcacccgatgcctctgcatcctgagtgagtgcctgaactaaaagtaatgcaccctgatgcctctgcatcctgagtgagtgcctgaactaaaagtaatgcactccgatgcctctgcatcctgagtgagtgcctgaactaaaagtaatgcacctgatgcctctgcgtcctgagtgagtgcctgaactaaaagtaatgcacctgatgcctctgcatcctgagtgagtgcctgaactaaaagtaatgcactccgatgcctctgcgttctgagtgagtgcctgaactaaaagtaatgcacctgatgcctctgcgtcctgagtgagtgcctggactaaaagtaatgcacccgatgcctctgcatcctgagtgagtgcctgaactaaaagtaatgcactccgatgcctctgcatcctgagtgagtgcctgaactaaaagtaatgcactccgatgcctctgcatcctgagtgagtgcctgaactaaaagtaatgcaccctgatgcctctgcgtcctgagtgagtgcctgaactaaaagtaatgcacccgatgcctctgcgtcctgagtgagtgcctgaactaaaagtaatgcaccccgatgcctagtccccttgttgtgcttcccagccccccatctttctcctcaggatcctgctctgtgtcctgggctggccataaactcatgatcctcctgtattagcctcccaaatgctggggttacaggcctgtgtcaccacaccaagctcagttgggtttcctgtttcttgtgttcaagatagcttcaacagaagtagttgtcacaggacacagcagaaagggttagactgataaatgtcacaggaattgggctattatttcttagcctgtttggattagaatattgttaagattttcaggatgacttttgatgattgatatttatgttagtaattgatttttattttactatgttttatgaaaggagttttgattgtaatataataggtgtttagtatgatgtggtttcacaaactgaacataacctgtataaccagcacatgaccaggaagacttccttataatccttttaataactgtgcctccccaaggtcatggctttccagatgaacatatagcttgatttgtttttatgcttgatatatatgcaagtatatagcatttattcttgtatccagcctctttcactcgaactcctattagtgaggcccattctttctctgttctgttttgttttctcattggtatatgttaactcatttgtgtgattgaaccacagtgtctctgtctctgactctctttttgagacagggtttctttgtgttgccctgactgtcctggaactcactctgtagaccaggctggccttgaactcacagagatccacctgcctctgcctccagagtgctgagattaaaggtggttgccatcacccccagccacagtatatctccttattgtcactgggcatgtcatatttagtttggattattatagtgttgctatgctatggaagtaaaatacatttactttgaatatatatctgatactagaattgttagttcatagtgtcaacattattacatagtgactgtttatggttgtttttctttttcttttttagccagggtctcactctggagtccaagccagtcttaatatgtggtaattgtcctgtcccatactctggagggctgagattataagggtgagccaccatgcttgtaggaacagtttttgaagatgactgtgtagatttgtgttcctgtgccagtgtatgagttaggtgcctatgtagcttctctgatacttgatatttgccatcattttcttctatccattctggtagctatgcagcggaatattagagagtctgtgggaagaattagctaaaaatttggagctccttgtagcattagtctgccacatcaaccccataccgtcaccagagccttactgtgacccatttctttatgcaatagggcaccctgttggaacaagcataatctgcactcacagtcagcaaacactcccagagacgatgtctggaaatggtcaactcagtccggtgtaatcgtgcctctctggaattccagttttggtctctagtgcttccacaacccttcaacaaatgtagaaatgtgattttgttacttattgtctttttctagttgaagctgtgtcagtttgtcatgacccaccgtgtcctctgcaggggtgggagttaccattagattcttggtagttgagcacagtcctgttccatggtaatttttctcccctactatgtgttttgtttctttttcttgctttcttggactgtttagaactaccaggacagggatgaacagtgatggtacctggttctggggctgagggtactgtattatttcagcattgtgagagatcattacttgtgttttttgtaaagtgcttttttagatgaaggaattaaaaaaaaaacttttattatgaatatgtgtgtatctgagtgagtacgggtggttagtatttatctgacatcaatactgggacccaaactcatgtcctctgtaagagcagtatggcctctcaactgctgagccagctctccagcccttgctgacttccctttgttattgggcctggcagtggtggtgcacgcctttaatcccagcacttgggaaggcagaatcaggtggaggtctgtgagttcaaggtcagcctggtctacagagtgagttcagggcagccagggctacacagagaatccctgtcttgaaaagccaaaaacgaaaaaaaaaaaaaaaagaaaaaagtcattattggtttcatatagttaaataattactccttatttgccaacatgattatgactcttcttttttctgattgtgtggtttcatgtatacttttgaaaaacaagtcacatgtaaactggttatgtaattgttttcatataagtctttgcaatgcctctgctgtatagttccttttatatatagcaatacaatttgcatattaaacaactataatagaataattttaagtagtattaaacagaagataaaggaaaaatttcaagttaaataaaccttatcccgggccccagaaatggctcggtggttaagagcaccagctgctgttccaaagggcctgaattcaatccccagcaaccataatatggtggctcacaaccatctgcaatgagatatggtgcccttttctggcctgcaggcatacgtgcagacagaataatgtatacataataaataagtaaataaatcttaaaaaatccttatcccaaaagtgaattttaaaataataatttttttgccaggcaatggtggcacacacctttaatcccagcacttgggaggcagaggcaggcggatttcggtgagtttgaggatagcctggtctacagagcaagtgccaggagaggctcaaaagctacacagagaaaccctgtctcaaataaaacaaataataataataatataataataatttttcctaagtgggtcaatgtaaggtactcagtggctactcatacctaattccttcctgttgcactaataagaaagagagcccaactttgacaatcactgtatcaaagcagtaacacgagttgaattcttttggaatgcagaaatggttcttaatgcttcagtacacacaaactgaattcacagatctaccatggaaataaaagaaaactatgctggaattgaaactaggaaaaaagaatagctttatgatttctttgtgactcatgtgtcccaggtttcttggaactccatgtgtatcagatgatgactttgaacttgtgaccgtcatgaatgctgggattacaggcagcggcacgcctggctattggtgctgaggacggaacccagggcttcatgcctcataggcaagcgtcctaccaacgggctacatcccagcccctgttttcctctttatggggcatgtgttgtgaggacgagtttcatctcaggcactccatgggcagattcagaatgttcttctaggatccttccactgcatgcctttgttttatatagaggagaagaattctgaaaactttccttggagcagttgttttgactcaccttattttattatttggtatcataaggaaggataatggggtcaaggtagctggagtcaaggaaagtcatatatgattgctctaggtaccacctgccaccaccctgccccttcccacgcttcctctttgtctgtagttcctgctttgccacaagtcaactacctgactgactgcagttgggcgaggtacttaatcaccaggttttgtttcttcttggggttgaggaaggtgaccatcccagcagctgtgaaccactgtataaggagaacgagaggattaaatgagccatttacaaaataataactttaacaaaaatgggagtaatcattaggattaggtttgtacaatgctatcttacactttgtaataacccacagacagactatgcacagggtacttgtgcacagggttctcgtgatgaagacgcttgcccccacctgtacctgcccctgttaacaacgcctgtgctaagagctgtaactgcaggaggcttaaagaggaagtttggttcatttgcttgaggaggcatcgcatccctgttgacatctcacattgggaatgaacagctcttaaaagcaggcacctgaactacacattcagtaaagaactgatgtttaaagtgctgttgctatatggttcatttaaattcagccaccctaagccaggcggtggtggcacacgcctttaagtcccagcacttgggaggtagaggcatgtaggtgggtctctgtgagttcgacaccagcctggtctatacaagagctagttccaggacaggctccatagctacagagaaactctctcttgaaaaaccaaaataaataaataaataaataaaaattcagctaccctaattcatttaaggttttagttgttgatcgtacactcttttccagagggccaggtcttctgcctagaacaagggcagtttccaactgtggaaagatgtgagttaggccacaggatcttagtctgtgccctttttcatgagcgagcttctttatgaactgaagagaacccacccctaagacagaagagccatggatagatggtaccctgagacatgctgccactgttttagatccagtaacacttacttgataactgtgctcataacctcagttagtatgttgaggcatcgtaggcttccccatactaccaggaactctctgctctgcttccagtggagagcagggtttttgcctgtgtttctgatcaggtgctacctctgtgcccttcctccacatgcaggggtgttgtaagatctggtttccatttacggttggggagtggatgggtggattccacagagggaggttttgatttataaacgtcactattagcatgatcacttacctgtccaggtttacaggtctttatttctaaattggttttaactcaaatcttgtggagtacaactgggttgagaagaaagccagtagcaaagtaaactttcccaatctgttattaaacagactgtggaacacttaaccacacacgagcaattctgtaaaaggttacctgaataaaaggctatttacatagtgaggttttagaagcagtaaaatcacattcagtttacgagatgttagaaacttcataaggcataaatctgtcagtttccagcattgtaaatcacaccattccttctgtggaacaccccagtccactccccgatccactccccaaaccccatacctctgggggccagcaagatgacttagctggtaaaggggctcactgccagtcccaaggacctgagctgactccctcaagctgtcttctgacttccacacacacatacacacacacaaacaaataaataaaaatgttataaaaaattaaaattcttaaaaacatctaaattcttaaaaccttggtaaagggatttggaaatgcctttctgttatgcagatttgttttggagaatatgaaatctaggccttcacatgctttacttcataattttttgtttgcttgtttttcgagacagggtttttgtgtataactctggctgtcctacaactcacagaggcctgcctctgcctcctaagtgctgggattaaaggtgtgcactgccaccaccacctggctgtaattttgcttgtgtttggtcttggcttttcagtgctggggatggaaccagagcctggcacatgctgagctcctaaccaacttctgaactccatccctagcctgtgactttcaggtggaggttctggttgcattgcagtttgaagagcatcaggcttccggggtttctgccgtggtcgcttgctttttttctgttaagaggcctggtttccttcttcccttctactctgattgtccctgtctctctcttctcctaaactgggttaggtactgctctttccttcattgtgccgccagacaagcttgtcaccaacaagcacctgcccgcctggtgctggtcggtgtcctgcagagtgagggctctggcgtccttatctttgtagtggatagatgtatatccatgtggtgcctgggcctgggctctcgtgggcctcctgaaatgattgttggatatgggggttgggctgaggcccattccagcagggtgtaagttgtgatggtaagttgttgtggaattattttgggtaatgatttaccatccctgagcttccacttctggggatctgttaaaatgcagaatgtagttgagtaggtctgtggtgggttctgatattttacatctcaccaagctcccaggaggagccagcaccacctgttctccaattacaaaggattgggtagtttggttggcttttgtgaagtcatttctaaacatgcctgtttatcagaatgctgggtaatgacagttctgaaccttaggaagtttccaacatatggtaatgtccctaaagttgacatcagttttattgctcctacaattttgactttgacaagttaaaaataccaaataaatgtctgggaaaggatgtgagtgagcatttgcccctcatctgaaacactggatgcttgctttttgaagacaagccttatgctaatgaggaagccgagatagagagacatgtgatctcctgagtataaatataagtccacagacaggcaagctgttgatgactccatcatcatcagaggcgttcccagttctccagaaggtaagaatcaactctctgtggagagggttggtacactgtctggaaaggagtccttttcagaatgttgcctatgtttcctttttttcttttttatttcctcgcaaatgccgtggtatttgatatgcagcattgctacttgggaagtttttagctattcttgattctatgtacaaatgtctaaaagtagttgcattggtttttatgtgtaacttagtaagtttgtctcctctcagctacacagggatatgaatcaggtacaatttcagtgtccatatgtttacagccatgtctgtgatggactccagtcattgagaaatagtgttttctggacctgtagctgttggccctggtagtctgtgtctgggcttcctactttctgtttactgtgtttgctacataactctggctggcttctaactcttgttcatcctgctttttggtctcctggttattgggattacaagtgcctggcacaagtttaacacttttttctacaaagtttaaatctggacactagaagttggaaaccttcaagaagtacagtatatattgttcatagttgaattggccatttttatataatgaggtgggttttgtttttatttttacttttttagaaataggatacttaatgcaggttggtgttagattccaaacagcaggattccttatgtgtctcgagaatgacctccaactcctgttcttcctgtggcctcttcccagaggctgggtttacaggcataaaggtttccttacctggcttctaacagttttaaccccccagaggattacacagtttgtactgtcaaagggggctaaatctcaccttctcacaactggtgtgcatgcattggggaagcttgtgagtcatcatcgtcacatttcaaatcatttgtaatctttgggtctcctaaagccagcgaacttcctggggcaagctcactagcagaaactttcgtgtacaggatgggagtgtaagtaaagaccccgtaggcttgcttagctcccacctaaggaaaagcttcatcagaagcatggactctccctgtagtggagccttgctgggcaggctgaggtgcattgtgtgctccttattaccacatttatttgtttgtttgttttgtgacagtgccttaatatgtagaccaggctagcctcaaagccacagaggtctgcatgtctgtgcttcccaagcaccaggattaaaggaatgcatgaccatgcatgtctcctttacccctcccatcacccccttcctttttccttggggtggttatttgatagcgtgtgatgtctagttagagcattgtctcccttattatatgcctttctccttttttgatacacagtcttgctatgtagcccaggctgacctgggacttgctatgtaatcaaggatagcctcaaactcggtatcctcctgcctcaccctctcaagtattgagagactacctgccttgtaactaatttaacattatgctgccactaagttgaaattcagttctctccaacccgcatccctagtgctgggcattgcacgatagggaaggcacctatgacctagccacacccctaacccttgaattctttttgtttgtttaggcctttctgagattgagtggtaagtgggaggggtcgagggatttttatctttctctaacaataagattactttatggctaccgacataggaaatagttgttagtgatggcatttcactgggacatggtggagcatgctggtacctgcttgaaattccagcacttggaagtaaagaccagcagatcaggaattcagtgtcatcatcagctacatcttctagtttgaggccagcctgttaaacacacacacacacacacacacacacatacacacacacacacacacacacacacactcacacacactcacacacacacacacacacacacacacactctctctctctctcacacacatacacaaaaaaaacaaacaaacaaacaaaaaaaaccctccattcccaaaacaggcatctcactttcaaattactgcccccaattttccctaaaatgtcccaaaatatgtgtgtgtgtgtgtgtgtgtgtgtgtgtgtgtgtgtgtgtgtgtgtaagctagaggctgatgtcgaatatattctttagtcatttctaccttattttattcatttgtgtgtatgtgagaggctaagcatatgctttggcccgtgtatagagtccaagaggacaacttgcagagattccggggattgggtttaggttggtttggtggccagcacccttaactgctgaaccatctatccagctcccacccaagcttattcactgagactaggtctctaggtcaaacccactatgactagtcttgttagccagcttgctctgagagcctctgattctaccttagagcctgggattgtaggagtattacctcacccacctgcatttcagtaagggtcctcatacttaggcagcaggtgtttgatcacagccatcttctacacccttgtcttgaggtgttaacacagtgttttatccagaataatagttgctggtcatggagttctaggtgtccgcctgtctctgtgcccacagtgctagggtgaaagtgagctgcagcatccagcttttatattggtgccaggatgtgagctcggttcctcatgcttgtgtagtaggcattttataggcttaagaccttttcctagatccagttttgtattttatgtttcttaaagaaattttagttttaatctgtctgtgtgtctgtctgtctgtgctttgtctatgtacatacacatctgtgtaccacatacatagctggttccttgaagagtccagaagaggtcattggatcccctggaactagaattctaatagcctgttgtgagttgccatgtgggtgctggaaattgaacccttaggtcctctggaagatcaaccagtgctcttaacctctgagccatctctccagtccctactttggtttttaagaaaggcaaagtcattattatcccttcctgtataagtcatgatatggcttaaaattttttgttttatatgtatgctttgtctgcatgttttttgtgtaccacttgtacacttgtgcctggtgcctatggaagccagaagagggcttatcatctgaaactggagttacagatggttgtgagccaccagctggcttctgggaacccaacctgggtcttttgcaagaccagcaagttctcttaaccactgaactgtctctccagacctgtgttgtgtgaattttaaaagcagtattatacgtttagtattgtttatagtattgatctttaaaattccaaatatcagtcgagcatggtggtgcacacctataatcatagttcttgggggacagaggcaagaggatagtgaatttgaggataacttgggttgtgtaaagagaacccatcttaaaacaaaacaaacaaacaaacaaaaaaaaaaaacaaagcaaaacccagccaaacaaaatcaatatcatttctgaaaaaatatgtgtatgagactgtgttaatagtaaatctctttagtttaccagcttttactctgattacatacataatatatataatttcacagaggaaggcattctgttaaaaatcaggctagacttttctcctaatgccttaaagttccctcctcattctcacatatatgtgtagtgtgcatgtgtgtatgcatgcttcgcagatgtgtgggcacatgtgtgtgtgtatggggggtgcatggaagcccaagtttgatgttgggaatctgccttgattattcttgcattttaattggagtggggaggtctctttatcaactcagtttcccatgtgactagtcttgctaaccagtttgatctggggatctccaatctccaccttcagaggctgaaattacaagtgagccacctcaccctcctgacattaacgtgggttcagaggctctgaactcatgtcctcatgcttatttatgtagccaatgcttagccactgagtcatctcacaaaactatgtcttgaggttttagcacaatattttatccaaataatttcatgcctatttatgctccctgtggtttatctttaggtctggctattggccatttgtttgttttttattgtcataatatggatgacatagctcagggccttatgcatactagaccagtgttctatctctgagctatgtcagcagccctggctatcatcaatcttcaaaggtctacctttgtcttctaagaagccagggtaccaggttcatgtctttgtaatttcacatgtgttttcggctttacctgattcctgtatgaactaatatttgaggtttaatgttttgtctgttaagcagttcctagttagacaaaagtaccactactttaaaaaaaacaaaaccaaattatgtataccccgtactgtggaatcccttcattgtaccaaccccaacaaacaccctatggaatcctattagctggtggttcattatctatcactgtctctggcctccctggagaagaaagggaagacctgcgagagaaagccctttgcttgtttggacagtgctggagattgaacctagggcctcacacatgttaggcaagcactctgccatggagctatggccccagcccgaggaaacccttgaaagataagactgcttctgcatggctcttcagtcagctcttcagcaggttacaaaaatcacttgggagcttcctgacttttcatttgtttcatgcctggcttttgttgctgccacgggcagcttgttagtcttattttccagtatttcacagcattgttcctcatggaggctctgttcctcatggaggctattccatatgctctgtgagactcaggcgatgttgcagccttatattagactccatcaggctgagcaatttggctgattcaatatagattcttatacagtctctcacctcactctctagccgatatctttgcagtgtgtgtgaacttagttattggtgattgaaagccaattgtaatagcacactgaccagctcatggtccagccagcctgttaagtccccattggagtgcttacctgcatacagaagtggttccagagaaaacactgttagcgcctctctggagagcgagggctgaggtggagaggagggatggctataccctctatgtagcctgtaaagcatttccttcagggctcagtgggaaagcaagcttcgccctgagtgtgaatcagttcagccctcagcagcagaagctgcaacatcagaagctgcagccaggggttttggtttgttatatgaatttgtttgatgttctttctttttttaaagagcagtcactatacaacaaatatccttttctttccagtttccaaaaaaagacttacagcaaaatgaataatcctgctatccagagaatagaagaccagattgtcaagtctcctgaagacaaacgagaatatcgtggactggagctggccaatggcatcaaagtgcttctcatcagtgaccccaccacagacaagtcatcagcggccctcgatgtgcacataggtacggtttagtcttgtggatgatccagtggcaacagggtttgtagaaggtgccacgtgcataaggactcagtagatatcactttttttttttttttttttttttttttttttgattttcgagacagggtttctctgtggctttggagactgtcctggcactcgctctggagaccaggctggtctcaaactcacagagatccacctgcctctgccttccgagtgctgggattaaaggtgtgtgccaccaacacccggccacatttatgttgttttccttatatttttagtatatttttgtttggtttggttttgtttttgagacaggatcttactaatttgacatgatcctgcctctcaagttacagacataagccaccaagcctatttgtggtgctttgagacatggtctcaccattagctcaggttgtcctcgaacacatttaatggagtccttttatgtttccagctcagttaatgtagcagcaaagaaattcattccattctttaagccagttctttttttctctggtatattgaacttgatatttcataggttcttatgtatacatttcctctatatgtaatgttactttagtcctattatctgcaactcatatatatgtttaatgggaaaatagttgtttttaattgtgggtttcttctttaataaaagctttaattcagtaacattttagaattggggaataaggtaatattaaacaaataattactacttaccttaatgcagtgctttgcaaattctaattttgtttcttttcttttttttaaacctccccccccccacacacacacacacagagtctctcttatgtagccctggctgtcctggaactcaccatgtagaccaggctgctgatacttaatttgtattcagagggctaaaataggagtatataaaagacatcactgaagcaagagaagtaaagtattctgcttaaaatttcacagctatgctgagtatggtggctcacacttttaacactagcaagtgggggggtgggggcagagggattactgtaagtttgagacctgtgtggggtacatagagagactttatttcaaaacagcagtgaacagagaattagaactaagaaagttctgtaattgtggagttgctgctcctccaaccaggctccccagggacatcacacagttgacccagtgttgctctctaagtgatggccagacctggatctttttgtttgttttgttttgtgagacagggtttctctgtgtaacagccctggctgtcctggaattcactctgtagatcaggctagcctcgaattcatagagagccagccgcctgtctctgcctcccaagtgctgggattaaaggcatgtgccaccactgcccagctaagcctgggacttcttgtttactttctaagtaatgccatttcagagcagccgcacttacctctcttggtgtgttacattgagaatttctgtttactagcagttaccaataaaaagtgattgattacatatatgttttcattaatttcatatgtattttctcttccaggttcattgtcagaccctccaaatattgctggcttaagtcatttttgtgaacatatgctgtttttgggaacaaagaagtatcctaaagaaaatgaatacagccagtttctcagtgaacatgctgggagttcaaatgcctttactagtggagagcataccaattactacttcgatgtttcccatgaacacttagaaggagccctggacaggtaacacttaatgccttgcaaaatattgaattttgtagttactcacattaataaaaatagtaattactgtttttcaaaggtgacatcacctttttatagtttaacagagatactgtagggccgatgaggtggccattgggtgttgccctgagtttgatacaggatccacatgatggaaggagacggaagtcatcctctgacctccacatgcattcctctcctcctccctgcccaagatagctaaatgaagtatttttttttaaagatattttgtagcctggtatagtggcaaatacctctgctcccactccaaggcagagataggtggtgtgagatccaggccagccagggctacatagtgagatcctgtgtttagaaaacaaacaaaaactgtgtttataaggcagaaaaattaatgagatgtcacatatttacttcatggtagaagaaaataatgacacaactataaactggcctttaggactataaaatattatattgacttataaaattcttactagcccttctcattctaactggactctcatctgtgacagatggtaaagaatgacctgtgacagggcctggagagatggctcagaaataagaatacttgttgctcttctagaacatctgggtttgtcccagcactacttggtggctcatagccacctataactctaattacaggggatctgttgccttctcctcctcttctcctgcccccaaacacacacggtgcacatatatacatacagggaaaccactcaaaaatactaaaagaaaaaaaaatttaaaaataaaagactaatttgtgacagtgtcgcagatcttttttttttttaagatttatttatttatttaatttattatgtatacagtgtgtgccagaagatggcaccagatcacattatagatggttgtgagccaccatgtggttgctgggaattgaactcagaacctctggaagaacagtcagtgctcttaacccctgagccatctctccagtccctcatagatctcttttaaaacccacttactgttccagaatgttatgtcttagatagtctcttttgccagtgtcacacttcccagtgatacctacttagtagatatagagttataaacaaaacaaagcaaaaccctgtgcatgcgtgtgtgcatgccatggttttgtgttacgtcttcctgtgcaggcatgcagatgccacagagtgcatgtgaaggttagacagccttgcacgtcagtccttgccttgcaccatttgaagtaatctcttgtcatttgctaccacagataccaccaggctagctgtctgcttgtcagctcccctgaggagtactggattacagagtcggtactgtgcccggcttcaaattcaagtcttcagccttgtactgcaaagggctttgctcactgagccatctccttagctcagaaacagtctatccaacctgctatttcaacctggaggatgtcttgagagtattttatggagcaggctccattaggacagtgtaatttcttttatttaaaacattttaaattagccaggtgtggttgtgcacacctttagtcccagcatttgggaggctgaggcagggggaatctctgagttcgaggccagcctggtctaggactgttaaacagagaaaccctgtcttgaaaaaccaaaaataaaaataacttttttatttgctttgtgtgtatgtgcagttatgctcatgtcatgggatacatgttgaagtcagaggacagctcttcagagttccttacctcccttcactgtatggatcctggggattgaactcaggtcatcaattttagtggcagacaactttgcttgttgagccatctccatcttgctggcccctaatttaactttttttcttaagtaaatacattctttttcacatttatttatgtatgtattttatgtttatgggtgatttttttttctgtgtgtactacaaaagagggcatcagatcctatgggactatagttacagatagttgtgagccaccgtctgggtgctgggaattgaactgaggacttctagaagagtagtcctaggtactcaagaaaggtatatcggttgcttgtgttagagttacataccatgttatttgttgaattgatgcttattaaaaattcataggttatttactattttacaaaagcttgtaatcatgacttagacggttgtgacatacttgaggtttttttcattgcactatttttttctactaaagtttttctaaatttgaatcacaccttttaaaattcagtcactcactttgtttgtcctgaggtgcttgagttttaatgagattcatactgcaggctgtacatttaagatttttaagacatttaaaaaattatgggtaagtgtgtatgtgtgtgtgttcatttgagtgtgcgtgcttgtgagatgtgtgtatatatgtgtgcctgtgatgtgtttgtgactgtaatgtgtgtatgagtgtgcatgtatgtgcatgtgtgtgataaagcatgatgtgttgatgacttatgtagtgtgtgtgtttcttagggggtagagtttgtccacatgccttgatgcacacatggggtcagagggaatctgatttttcttgctactgtggattcctgagaccaaacgtagattgtcaggcttgcatagcaagcatttttatttgctgagacatttcattggctatacatttaaggtttgacagggttatcaactgcttttccccctttggaggaaactttagtttcatagagatgtcaaactacaaatatatttttgacttttgtttttgttttttgagacagggattctctgtggctttggtggctgtcctggaactagctcttgtagaccagactggtcttgaactcacggagatccacctgcctctgcctccagagtgctgggatcaaaggtgtgtgccaccaccgcccagccaaactggaaatcttaagtagactacagctatctcttaaagtcagttttgaccttttaattttttttttttttttttttttttttttcctcgagacagggtttttctgtgtagctttggagcctatcctggcactcgctctggagaccaggctagccttgaactctcagagatccgcctgcctctgcctcctgtgtgcccggcgaccttttaatgttaatatacttatattttcactaattttagcatctctgaagatcaacacctctgactttacatatgtccagtagtgtatttttcttttattacttagaacttcttttatattcctttttcttagagcaatggtacttttctctccccccaacccccaaaatgagacaaggtctcactatgtccctggctgtcctggaactcagtctgtagaccagattggccagagatcagcctgccactgcctcctgagttctggggttaaaggtgtgtgccaccagggctggccctggtttttttttttttttttttttttttttttcccccttggtcttgtgtattctaggcaagcattctgttaactgagctgtgtcttcaaccccaatttcttctggtcttatgcagttcatattaactatctaacagtttcagaaatattttaaaagctgttctttcaaaatcatagttctcaagttggtaattctgccttacacccttaggtttgcccagtttttcctgtgtcccttgtttgatgcaagttgtaaagacagagaggtgaatgcagtggattcagaacacgagaagaatgtgatgaacgacgcctggagactcttccagttagaaaaagctactgggaatcccaatcaccccttcagcaaatttgggacaggtttgtcactgtcatgcatcagctgctgtactcctgggtctcgctgagtctcatgggtttccctgcacaggaattctataatttctcatttcattttgaatcccattcaagtaggagactacgtatttcaggagcagaacagtcaaccagggctttgagcatgctaggcagtcattccaaattaagccacacccctactttttttggggggggttgtagctcctatggtaactttgttactgctagaattatgaggaattacccatcaaggttactgtgcttttaaaaatgctttagttattttaaaatttaaaacaatgataatatattatttagtacatttataaatttatgtttattttagaaattaatttctttaaatttagatactatttcttagacataacaataacttccagagaaattgacataactacagaattaggtctttgtagaagttaattggaaaggtaggcatagtggcttcctaattgtactgttacagaaatctccctgcctccctcctttcctcctccctccatccctccctctctccctctgttctttccttccttctttctttctctctctctttttttagatggtcttttgtatcgtaggctggttttatcactctatgtggaggaggatgggttatcttgagctcttgatctcccaagagttgggattagagcctgaacactccattatttcattttaaatctgaatccctggttggtatccacatggcttttcctctctctctctctctccccctcccccctctctcttatatgtacctttggttttagttcaatagattttaataaattagaagcttttgttcttccatgtttggttttggtatttgattgcggcttcttgtttccctgtcaatgggagctgttgagtattttcacaagcagtcttggaacaggaaaggaaaaaatgtagttgtggttattctcgagtgatctgtttttccagtcataacccccgtagacactgagagcaactgggtgtggtcatcggggaaggaaatgaacgaggaagggaaagagggggtggccctgctcgacccataggtggaccagaagtgggaggacttttgggtggggctgtgtttctgctgtgggtgacactttcttaattgtgtgtatgttaaattgttacaaaatcttacataacaagttccaatattataaatcgggccatgtttactttgtcagttgtcaacttattttttgttgttgttgttttccagaatgtaaagggtattgtctacactagcagggtcaacaggtggggaggcaaagccaaccctgggtttcccaggagtcaaatcaggcatgatttctcaagatcattgtccctttcccacattgttggttttattgagtgctgtgctaacaagcactttctttacctagagtgtttatttattggtttgtttttgtttagtgttttgaaacagggtctcctgggtggtccatgccttcaccagcctcctgagggctgtgattacagttttgtgtgttgttcatgtagcccacactgtgcagtccaggctggcctttggagtgctgtggttacaggtgtgcaccactacatctggcttcctttgcccataatttgatcagactatttgtttttctgccatggagttgtgagggatctttgtaaattttggattatcacatctgttatatgcagatatttttttaccagtccataggttgtctttacattttgttggtttctttttgctcttctgtgcaaaggttcattagattgatgtagtttcatttatgtaacttgaatttatgaaatgatatcaaaaaagtcattggcatggccaatagtaagtttttcctctgttgttttctagaagtcttttgttaggtctgtatctgttttgatcctgtctcttcttttgtgttcacacaaaatggcaggtgttgaatcagattcatttttttaaaggatttacagatgtatttattggtggtattactggattattagtacagagagtagaatacaaagaaatcaatagtttaaaggaatcaatacacttttttaattttttgttttgtttttttgacacggagtttctctacacagtcctggctgtcttagaactcattatgtacaccaggctggccttaaactcaaagagatctacttggctctgcctcacaaatgctgggagtaaaggtgtatgtcaccatgctcagtggaataattgattttaagtatagcatttaggtggatggatcattttgatcatcatttatgtgtatgtctgtttgttctatgtatgccatgtgtgtgtgagtgtttgtggaaaccagaagagggtgtcaggtctctggaactggaattataggcacttgtgagtcacctgatgtgggtgttggaaacagaacttgagttctctgcaagagctgtatatgtcttaactgctggccatttcttcagccccaaatgtcattagattcacaaagaaatctaaaactagttctagagctttcattctgaatatagttagaactggagtctagtgtattccattcttaaactggctgttgggccagcaagatggtttagcccatcaagccacttcctgccgagcctgatctgagcttgctctctgggaccacaaggtagaagagaaataactcctgcacattgacctcggaccacatgcacacccacataaccggcactcagtaaaacacataagcaaaatcagctgttactttgctgttcttggaccaagcataatcaattttgtttttaattaaccacacagataagtaggatttttataacagctcttcagtatagaataaaaaccaatgagagaaaaaagcttcaatgccagttatatacaaagtggagagagactatcagtcacagacttgctgattctactgattcctaaccatgggcacactagttctactctctgatgtctaattttagcaacaatccagttagcagtagcttcaatgcctttgtactataaaccaaaaccagtagctctaccactagggtttttcggtttagtcaatgaacacaacattcttctaaaagggtcaatacaagtaaacatgcccaaagaaaatgtacagtcctcgctgccccatactgagagaaattatgaagagccaggaacaggcatttgtctcatttctcctgtattcctttaatgtacccgttcaggctatgttttagtcacagagtagttcatgtctagaggcaacaaaacaatgacagacagcacaagactccccaggagcccaggtcctctgacaatccttgccttactgtccccaaactggaaaggacttcttcactcgatgtaggttgagttggaggagaaaaggtgaatttccattcactttcaccacgagcaggctgcaggatctctaatgagagggttcctgctaattccttgtaccttctgtccatttggatattccagcagataaatgacatttttatttactcttctgcatgactgcaaatattagttttgagtccactggtgtccacagaggtagggagctgtgtttctttcataatatgtgaccagcagatactcagtaccagatttatgccctagctggcagatgcccacattccctcaggcttctgtgagctgaaggtctgtcctgtccctgctgtcacagatatttgggtcaaagccactttccaaaagctgcttataataaaatatcctatcaatacaggcttgtagcaaggaagcattctgagaatcatttataaaacatatggtggtggtgtaccttgtaattgctgcatttgggaggtggaggccagaagatcaggagttcaaggtcatcctcagctacatagtgagtttaaggccaacctgggccacatggtaccctatcacaaacaaacaaaggtcgggtactgctctgccgtggtgggtggaatatgtgtgatccgtaggattagctctttccttcagtggacactcagtgcttgatctgaattccttacaaaattcaatggaagcattcagtgacatgctagcagtgatctgcatcctaaagcagactgcgacagcatcagctcctaccagctgggccaatcagaggcaagcagagcccactctgggttagtgatggcttcttgcccttgactttttgacatgacaatgtaacatgaaaactaaaagaccctgagactgatattggggctcaaacttcaagctgaaggtcagaaaagcaaaatagccggccatcagctttcaccactacctcaggctgaatgagctgatgctgctgcctctcctcggtgtggctgaagaatcctaagactgaatgtcttcctatcctcaatgtggctggagaatgaatgcctcatctgagtccttgctcctgtcttttatacccctcataagtcctgggattagatgcgtgtgatcccaactgctgagatcatctttgtgtgagctctttctctttaggattatatcaattctgtgtagcttagtgtggccttgaagtaacagagatccatctacctcttaatcctgagtcctgagattaaaggtgtgtaccaccacttcctagctcaatggctactgggattaaaggtgtgtagctccattgcctgaccatcattgcttgtggctgactttgctttcggaatcctcaggcaagctttaataaatcataagcaatatatcaccacatgacaattttgtaatagatagtagtgttcttccattgggcgtacggtatttgtctgtctgtgaagtagtgagtattgatctcagtgccttccctccctaattctgattctcttcattctgttactcattcttgttcattagctgttcatttctaagttcattacaatgactagaaaaatccccctttctactatttgttgggctagtggtacaattattgcacaggataaatgcattcatttaccagttttcaagataatgtgttggttccctgccatccttcagaggtaactaattgatgttttgagtatcacaacccacttgtggatatagaaatacttgatatatttaactgacctaatcgttactattctctaagcttttcccatgggctttgtgtttgctttgttcccctttgcctccttccttttttccccccagagcagtcaaacattttattcagaagcaaagtacattggcaggatttctcccagcagaccctgggagaaagggtcacagtcagcatccggatgtccttggtccagagctagggcttgctttaatattgacagagccaggtaggatttctgatccaagtagcagcattttaatttggtacaaatgacccagccgaattagcactaatttagggcagtgtgtgtctgctcgttgttatctcagctgtattctccttgttccctacatatgggatcttgggtaggaaactgtcatcgggaccgttgattcagctttcttctctacttttctagctgtagtgcttactttttcccatttgaaatacgtgcatctttttgtgtgatatatacataagccaggattccttcctacacttcactaagcagcattccctaatttacaaggtctttattacagaaggtcactaatttctgacatgcagttttacccgaattctcataagagagcttacactggcacactgtgtgcatcacccgagagctacaaaatgacatcgcgccctgttcttccccagtttagatgaaacccatgagaattcacatcacaaatttaatgcttcttctcaaaatagtaaatttgttcttttctttccacaagtaacttggtaaattccaaaaagattcccccagtgagtctgttcaattaattataggatgcacagggaattgaaaactaaagcaagtgtgagtggaagccagtgggtctcatctgatctaaaaatggtcattatgcctaactcctgaagattttagcaagtttttcattcatttgctgttgtttgagacaaagtcttactttttaactgaggctgacctcaaactcagtatgtagcaggctgacctgggcctgcagtccttctgcctcagctttctaactgataggattataagcatatgccaccatgcctagcctaaaaagcatagctttcatattgcatttatagttcctactgggaaatgctagttgaaaatattactagttagccagatatggttttgaccccagcacttagaggcaaaggcaagcagacctctgagttcaaagtcagcttgttctaatgtatcaaatgagcctgggctacaaagagaccctgcctcaaacaaacaaatacataaaattaataattttattgtattgccctgctcctgtttattcactttatgttcaaacatagcatgtgttagtttcttacattcttcttacagtttaagtatcagtaataatgcaactgttaaggtcccagagtttgtcttttctaagtaatacttttcatccatttttaggaaacaaatacactctagagactcgacctaaccaagaaggcatcgatgtaagacaagaactcctgaaatttcattctacatattattcgtccaatctgatggctatttgtgttttaggtcgaggtaagaactcttcaaaattttcagacaatcggtggagtggtttttgttttttgttcattatgactttttacaaagtattagaagggtatgaggtataggttgctcatagtcttttggaaatgatctgcagatgggagctttactaaagctccctgtcttccaaaaagaatatgtgaattactggtaggttttctaactatgataggataggatacatggtggaagagtgacagatttgatcttataatagctaaaacatttgcaaatgaaatgaaaatgtaaaagacaatagatggaggtatttgtaagcaacaaaggttgttgttgttgttttgtttttgttttttgagatagggtttctctgtggctttggaggctgtcctggacctagtttttgtagaccagggtggtcttgaactcacagagacctgcctgcttctgcctcctgagtgctgggattaaaggcatgtgccaccaccacccaaaggtttatttttaaggtgggaattattgataatatgttgtttccctgtcaaacttgtgttttggttttgcgttgttttaagtaatgctgggtttggttgtggctgctgttctgtattgctgctggtaaatgggactttcagatgccctagtctttctgaagggcagtttctttttatggttatttgaggctggatctcactgtgtagaccaggctggctttgaatttgtggtagtcttcctgctcctgcctcctaagcattgagattatacatgggagcctgacccaaaattaaaatagttatatttgggttggatacaagacataatggaaaaagagaatgctaaaaatgtatgaatgtggtatagctgttagaactcacactctatagtgtcaataccctgtctttgaaggccaaatatactgcctacttaactttgtggttgtgaactaagaagttagtgaacttttctaaatatctgacttgacatttgtgaaatggagataggggctggagaggctgtcttctgacctatgtgcatgcatgcacacatgtaagtaaatgtaactaaaagaaactttatcatactgcttactaaagatatatagcctagaatattcagtattactgggtatgtagaaccctggaaaatgagtacctaaaagctatgttgtttcgcagataaaaaaaagtatgatttctgtcaatatatgtgggataaatactaattgttgttttaacttgggcacagtggctgcaccttaatcttctgcttaatctcagccagcgatttcaactcctcagttgccctgctagcggcctggcgcctggcgggaattctgttcccacaggcactggctctgtcgctgcctctgaaggtagctttaactaaatctctattgttctatttataaataagactcaagattcataggctggggtgaaaacctgttagctcagagagtctgggtctcaattagctaacctttcttcctttctgacctctctctccaaaggtccatgcttccccacttagccaatccagaaaaaaaactgtgccactccaaaccccactctacttcctgtgtctctctatctctcccagacaccctctgaggctctattattactttttgtcaactagtggctaactcagcctcctgacccaggttaattttatttaattaatgcaaatacaaactgagggttcacagtgtgatggaatatcccccaacagctaagggcactagctgaattaaacttgagctctgccctcagtatttttgatttaatggaagtgatagagtcagatgtttcattttcctggtcagtacacatcacttccaacctaactggcttctgccctgagctcaatagagttgagggttctgggtgatgtgtccttacattgcagagatgtgagaaagaaacattgtcctttactagatcaatagatgatacactttttctttggggacaagaggaagactagccgtggaagggtctctgtcacaaaaggttaaaaacattgtctttgttgtagctgtttttctagttgtagcagcactaactgtccaaacatttggcaaataagtaatgatcaagtatagacagcgtagttaccaagccctgatatcacagttaagaggctcagttccctgggctctggtgctctcagcttagtgggaaagccagactgtgcagtgttactcagatgccttgcctttaaagagttccattgtgggtgctggagagatggctcagtgcttgtttttcttgaagggaacccgagtttggttcccagccctcacatggatgacttacaaccatctgtagatccaattccaggggatcttgacatgctttactgacttccatagaccacaggtttgcatgttgtgcacatatatgcacacatgcaggcaaaacactcataaaataaataaataaatgtttgtttgtttgtttttaagctcctttgtggttttgtgttttaagaagcacaaagaaatacaagaaacacaaaaaataccgagagttgcatcatatctggtagaacttgttcagaggacttcattaatacttgatgttgacaaacaattagaagcccaccatgcctcaagttttatcagtgcttaaagatgtcccctgactttttttttcttcaacacttaaaataagtagctcagactagtctggaactcaaaaacctccaaagttggccttcagttggaatgatagatgtatgcctctatgcctggccatttgacagctcttgaatcaagtatattccatccattctcaagttcacttatcatataacaattaatacctggtctgcgggcaatgatggcacacacctttaatcccttcactcaggaggcagaggcaggcggatctctgtgagttcaagaccaccctggtctacaagattgagttccaggacagcctccaaagccacagagaaaccctgtctcgaaaaacaaaacaacaaaaaaaaatcctggtctgccttttgtcagactgcatattttcctaaatatagctaagtagttgtttgtggaagtgtatacgtttagtacccgcacttagaaggcaggtggatctctgtgaattccaggccagcttggtctacaaagtaaattccaagccatccaggaacacagctaagtactctgttgtctttgatatttgttttgcgtttgttgcaaggcaatatatatggacaatatatgtgcaagctaatctgttatgaagaatgtctggacatttgcatctgcacggaagaagtggctgtgagagacacagctgtcagtgtctgcagaagcttttgatgcagtgtaggtggtgggtctgaccgcttcatcttgatcagtttcagggacttctaattttttttttccaggtttttcttttaaaactatgagacatttcagaagtcctaaggcctgaaatcctatctgtgcttcaagttctgattggttaaattcttttttctcttcgtttcttatagaatctttagatgatctgactaatctggtggtgaagttattttctgaggtagagaataaaaatgtccctttgcctgaatttcctgagcaccctttccaagaagaacatcttaaagtacgtgcacaaaattctgttatttatcatttgtggatgtaattgtcaaaatcagttttatgtgtggtaggaatatgaatcaataaagattgtacctgtatgttttgatctttgcatgctaagagtagtttgtgtagctgtgaccttgacaggctattaaaaatgttgtctgtgccagaaggcaagtatccaaagctgtctcaggatctagggcaccaagcctggatcacttagcccatgtaataaaaatgtactaaaagaaccagattcatttagttctttgtggtcacttctttgcagtctggcagctaattaaccaacatcagtattcttcattattagtaagtatttcactctatagaagttgtatatagcaaatactttgtgatttgtctgttttttttttttccctccccagcaactttataaaatagtacccattaaggatattaggaatctttatgtaacgtttcccataccagaccttcagcagtactacaaatctaaccctggtcattatcttggtcatctaattgggcatgaaggtcctggaagcctgttgtcagaactcaagtcaaagggtaagtgtcattgggcagtactctgaatgtagtgtcccctctttcacacagtccctcattgtcacctaggaagggttttagatgacactgttcatggtcctaagtaaagtggtcatcgttactgtgcctttgctttttgtttggggctccttttcacaaacctgttttatccctgagtatttattgatgagtgaaggtgaactatttcataagttatcatcatgcatgttggcactaaacccagacctttgtacctgctaggcaaatgctctacccccgagtcatatattcaactatgctttaagtgatgaagaggttaagaaagtcaaagcgcagctgagtgtaatggcacatccctgtagccctacctgtcaggaggccgaggcaggaaggtcattgactggaggccagctgtctcaaaactcgatgaaaagcctgtgacgaatcaccccccacccaaccatatgtgtgcatactgcttacttacctgctttgctcaatcagatcagaaaggtgtaggatctggaaagaaggtggtctgcaaagccctttcaggacttactgctgctacagtatacatttaagcgcatgtctaattgctggtgggggaagtttttccttgcagggtccactttaatttcttcaattatatggtagtagtagtggttggtgcacacctgaagtccagcaagtccaaggccaatctaaactacataaggagttctaggctagcctaaactacatagctatactctgtctcagaaataccaaaaaacagggttggtgagatggcttgctgccaagcctgacaatgtaaattcagtccacaagacccacaaagtggaaggagaaaaccgattctctcaggccgtttttttgatctccacaagcacactgaggtacaaacagcacacatacaacacacacatgcatacatacagaacaagagaaaaataacatgtaattaaaagactgaggttggggaaggtggcacagtagttaaagctcttgccatacaagcatgaggactgaggttcagattccccagaacccacttttcagcttgtaactccaccttcagaagatggagtcaggggatccccagaacaaactggctagggagactagttatatcagtgagctctaggtttgattgcggcacactacctcaatgaaataaggtgatctaggaccattgcactgcagctgtggccccttcatgtacttgtacccacatatgtgtgcataaacacatgcaaacatgcattagcatacatgggaaaaaaataaccatggagaaagcaaaacctgtgtctatatgtccccagggcctagtgagatggttcagcccataatggtgcttgctaccatgcctgatgacctaaagtcccatcctggaacccacatggtgggaagagagaatcagtttacaaaagttgccctctgacctcttatacactgtagcacatatgtgtacccacacatacacagaataaaattaaatttttttaatgttggggctggacagatggcttagagcaatggatcttatcctgtgggtcccgaccctctgggagtcgaatgaccctttcacaggggtcgcctaagaccatcagaaaacatgtttatattacaattcataacagtagcaaaattacagttatgatgtagcaaggaagagagtttcatggttaggggtatccacaacacgagggactgtattaaaagattgtgtgcagccttaggaaggaggagaaccattggcttagaggttaagagcttacgcctgtgtcagagaatcagaactcttatcctggctctcaccaggcggctcatagacagctcagctttactcacacacatgtgcacatgcacacacacacacatgtaagtaaaaaatatttttgaaatgttgaataaaaaaatagggattctgtgtgtgcatgtatggtgttcaagattgcaaacaaggtgtcatatatgtgaagcaagcactctaccatcgagctatatccctagctctagaatgaacattttagaaatgccttgttaggaaagaagccagggctggcataatgtcccctcacaggaggcactggctgcacaagccagacgacctgagtttgacccctgtatctcatgtggagggggaagacctgacctccacatcacgttctggcatagaacatgcacacataataatatcatttttttaaaagaaaagtcgcacatttaactcaattgcctttttctttgaatattgcaggctgggttaatactctggttggtggacagaaggaaggagcccggggttttatgtttttcatcattaatgtggacttaactgaagaagggttatgtaagtattgattggatttattttttaatttctcatgccgtaggtctgtttcatgttgaaaagctgtgtgaacactttagttcatatgctttctccattgtattttctgtgtgtaacttggcctttgtttgtgataatccctaccccttaacaattgatcctatgttatattagtagaatgtactcttgtctattgtgtcacatatccgtgagtccagagggttgcgtgtgggatggaagtataaactcagactcagggaggcgaggactccattttctgaaagggaccatctccacttgcctgacttcccttaggagtgatccatgcttgaaggattcaaggactgaatggtttttaagtgtgccccttttttccagtacatgttgaagatataattttgcacatgtttcaatacattcagaagctacgtgcagaaggacctcaagaatgggttttccaagagtgcaaggtacttttgtttcaccaaaatttttcttaagaaatctatttttcaaaaacaaatatatgtgaactaatttaactttaaggcccatttgaacttttgttttttttttccctaattaaagtctaaaatgttgcaatgcatagttgtattagttaaagcttagctatagcaatctaatttgttaattggggccttgtttaggggttgaggtatcacgtagcctctgtaggaggagaactagcatttttcagtgtttgtgttacttcctgcccaaagcttcgtgaaatgggtttttagatctggtgataaagctctacagtgaacactaaaagaaacaataaattgtttcatgtgtaataattgtattctttaaaatgatttatcatatgtgtagaaaaacatccattccctcacagccccctttttagacagggtctcactatgtaaaccaggctgcttcgaacccacaaaactctctacctgtgcctcttcctctcaagtgctgggactaaaagtgtgcaccaccatatctggcctttttctttctttttttttttttttaatgtataaagcagagagtgtttgtctttcaatttttaaatttatcttatcattattattattattttctgagacagggtttctctgcatagccctggctatgaaactttctctatagatcaggctacccttgaactcagagatcccctgcctctgcctcctgagtgcaggaactaaaccaccaccactcagctgtctttcaaattttcaaggacttcttttaaagaggattaaaaaaatactttatatataaagacctatcataattctaaaaatgaattttggattgggtaacttttccccactggtgctgaggatcaagtactatccttgtgtgggttagacaagcaccctaccaccgagctatatcctgttacacttggcaaaaatttataattattgcttgtggaaattatgacaataatttctaacgtgtagcattttgtctgaacaagtcttcaaatcatcatctggaatttttggatttcataggttgtacacagatctctgataccttgactagttggttcagtgatttaagctgtagacccctccccccccttttttttaagacattatcttattgctgtgccatctaggccagccttgaacttctgatcctcctgtttcagcctcctaaagtgctaggattctaaaactgtgctgtcatgcctgggtgtggctcttctcaggttaccttcatttagaattgtttatttatttttatttatgcctatgttgataattttcaagttattttttccatgtcttatacattcctaagtcaaatactaccagtttttcataagtgtaatgatgataaaattgtgggtacaaagactataattcaaacaaaacactagaaatgtatttctgaataataaccggcttatgtctaattgattaactttctgttttaggacttgaatgctgttgcttttaggtttaaagataaagagagaccacgaggctatacatccaagattgcaggaaaattgcatgtaagttgattttcctgtttacagtggtgtgcaggatcatttaagtcctccgtatgttactacagttctacacaaatgatgccatttggactcataaaaccagacagtttagcacagagcaacctttgatgacaagatatatttagattattactgcttcttttcctggcactttccctctatagtattttctttatgtgggcattttgcttatcagctgcatcttttcagttctgcagcatatgtcaggtgctcccctctgaaccttttatgttgtcaactttccctatttcccgtgttactgggctactgtcatttcttacttgtgctccttgcatggtctcttatctcagttttccatttcgttctccacagtagttttctaggttcactgatgtttttaaggcatacatcttaaaaatttatttattttgtggtgttagggtcacatacaaggccacacacatgccaggtaagcactgtaaaactgaactctgtttccaaaaccctgcagtgggttttgaaaactaattgcagattgttttatcccaatgtttaaaattcgcccacagttttcccctagagttatcataaaactcagaccatccttggcctatgaggtgatctgagaggtgccatgctctttgtctacattcctagccagtctctagcctccctttccagtcctgttttgttccagctttctcattttcacacattaattgtaccctttccctcttatggcattggagattgaatccatggcctctcacaggcgaggtgggctctgcacactgagctgcacccccaggcctctttctttgcacttatgttttgtcattttgaaacactgtcgataagttactgtaactagctctggcaggcctagaactgcaatcttcctgctcagcctccttagtggctgtctcacagtgctgcaccatcaggcctggctgttctttggttggttgggttttttttaaaaggacctttgaacttgctattgtctgtacatggagtgcttccatccggggcttgcatttccttgtcgtagatggtgtttagtaagaccttccctggcctcccaaatgatgcctctgcctccacccccttcttcacagtacctttcatgtgtcattctacccttatgccctcagtatctgaaatagtagctagcacaggaaaggtattcaataaaatttttatgttgagccaggcagtggtgttgcacgcctttagtcccagccctcccagttgggaggaagaggcaggcagatctctgtgagtttgagacctgcctggtctacagagtgagttccaggacatgctccaaagctacagagaaaccctgcctcaaaaaaaaaaaaaaaaccaaaaataatttttcttgatgaatcagtttgtctgagtgccagagacctgcttggggttttgggggaagagatacacatgatctgagggtgaattaggaaggctgccagcagcctttaattgagaagagattacacttacactcaacatatagttgcacataggattaaacaagaggcaagggcatgtgagctgggtataatttaagatcaagggttgagggatacagcattgaccttgacagtaggcaccagtcatttgttaatgaagggtcaccagtttctcttgctagagataagaatgatatcaagtaggaactttcctcaaacccccaagggaatggagacctttatctaaatgcctgaccttggaaaaggacttctggggagcagacactattacacatagtcttactacatgggcctgttcccctcaacgctcctaaaagggaagttcctaatgtcttactctttctcattataccataccattctgattgctcggtacttattaaccaaactcttaccttgaatggcttcaggctctggatctgaattgtaggcatttcatccttgggatcagttgtgtctagtgaatctctaactttactgttcttagtgtaattaggagtgtacactagaattcctggttccacactagcggggatttttttccaaagaattattttatttagagaagatacatttccatcctttaccaaagcccacacacaatttcccaaaaggaaaggcattagtagtgagaatcattacaaatgaaagtaaaccgtgctggagaagtgtggtctgcaatgcagaaatgctggaactttgtacgaagcaatggttgccaaccagtccatgttatctcagtttttaaccagaaatatatttttcctcaaaacaaatatgagagctcatgtttgtagggggctgaggtaggatgttgagttccaggctagcctgggctacaggataagatcctacttccccaccccaccccaccccccaaaaaaatctgtgatttttggtatcagtaatataagtatatgaaagcttaccttgtacttggcagaatcatcacattacaagacttaaggatgtgtcaggttgggccaggaatagctgaggaagggtctgctgtgtttgcacaggccctggtttagtctccagcactggagaagatgaagatgtggcaggggacagagtgacatgcaggagcacagagtgcttgctaatggaacgaaacaaacagaaggaaagggacctatacaacaataaacttaatttattagaaatctgcttacattaatgaatgctgtggtagccttcacatgtcaactatttatattttccctcttcacagtattatcccctaaatggagtgcttacagctgagtatttgctggaagaatttagacccgacttgatagacatggttcttgataagctcagaccagaaaatgtccggtgagtcatctccagattttactattacatattaaacttttctcatggttgtgaataaaacacttttatttctatttatttagttttgagacaggctctcagtatgtatccttgggtggctgggagcacaccatatagaccaggcttgcctcaagctcacagaaatctgcctgcctgttttcaggttctgtgactaacggtgtgcaccagcaagcctttgaacgttttcccatcaggtctgattacaagcctgttatgatggtgctaacccataatgccagtgcttgggaagcaagcattcaaagccagccccagttacatagtgagtttgaggccaagttgaaacttggtctcaaaatacaacataaaattgactgcagaagtatagactagtctgatgaaccaataccaaccacctctcttcgttcatcctccttcaagtccattgatagaaatgacataaaagaaaaaaaaacaaaacaaattaaacttagtttttcctatactctaacttctcataccaggggaatggtatgagaaatggtatggtatggaaatgatagtttttagtttaaaaaaaataaattgagtcaaagtttagaaatctttcttaatgaaaataagttatgagatcatatagagattaatctgttttcatatatccaatcacaacaaattacattatgtcttatgttttgtttggtttctgagtcgttccccccaccccccgcccccccagacagggtttctctgtggctttggagtctgttctggaactagctcttatagaccaggctggtgtcgaactcaaagagatccatctgcctgcctctgactcccgagtattgggattaaagacatgtgtcacaactgcctagcttgtttgttttaaagatttattttgatttaatttatatgtgtcttttgtgtggtatatgccacatatgtgtgggtgctctttaaagttggagggcattggatcccctggagctggaattacaggttgttgtgagtcaccagtgtgggtgccgggaactgaatttaggtcctctagaagagctgcaagtgctcttaaccattggaccatctctccagcccccatattgatgtttgaaaggggcggtctcactttatagccctggctggcttcaaagctgcatggattctcccaaccctgcctcccaaaagctgcaattataggagttcacaaccacatcagtctttgtttttttaagacaatctcactagtgtagctgttgataagcctgaactcctaagcctcctgccgtcaactcccagattcgtgattacagtcgtgcaccacctggcctgactcccagtcagtcttttgccatagttattgtctaacccttgattactcgatatcggattataataggaaaaatcttactcaaaaactagttgttaatagaagcaaagatctgtggcctgtcactctcctttggcagtggtgccttcagcataaggtaattaacttcaagaatagaaaagtccagaactttttccttttttgtcagtgaataatagagaaagttgacaattcagatgtaaacatccttattcctaaatggggctgcaatagagtcggtatgattcagatgctataaagtgatacaacacaagggctggctctaaggtcagtctcctgaactcatttctgtatatacatagaaaatgaggaagttaaaatatttattaaaaacaaagccacctgtgcagtggtggtgcacttctttaataccagcacttcaattccagaggcaggtaggtctacagaacaagttccaggacaaccagggctgcagagagaaaccctgggtggtagggggagcaatcaaaacaaacctgtgaaatacttaggagtttaaccaaaagtaaacaagatctccacacagaaactacaaaacctctgggtgtgatggcaagtttgaatccagcgtgggcaaggccctgtcacaaaaaaaacaaacaaaaagaatatacaggaccccaaatgtatcagccagaatgcatgcttactatgcaagcttggtgacctgaatttgatcccaaggtagaagaaaaaactgacttcacaaagttgttctctgaccatgtatgcataacatagcatgtgtacccacatacatggcattctctttcttgcgcacacacactcaccctaggaaaatcatgctttacccacatacatggcattctctttcttgcgcacacacactcaccctaggaaaatcattctttaccccatccatggtattcactttcttgcgcacacacactcaccctaggaaaatcatgctttaaatagtgagcgtgctggagcctgtgctttacttttgattaaatcacatgtttctaaatttgatgtcttatgcaattagacttctccttttccccttcccatcattttaaagaaaagtgtttttcctgtagaggcttagaccctttgattgctgtcatcatagctgtggcaggtcactaaggaagtgctgaacagcctgggataatctcaccagctgctaggcgggaactgtattgctcaagggaaggaaatcctcagaatgaaaagaacatgagaggtcattggctgcagcccaccagtctgctagcttaccgtgtatcacttaagtaactaccagcctcagtctaaattcctctaatgctgggaactcattaagtattgaggtagagaaatttcttttcagtattgatagtatttgctggtccatgggtattacttgtttctacatcatcatcataactctcctccttatgcctttgatgtgtttatcataccccttaatgtgcctagcttaactaataagtgaccctgttaatttgagagttgatattaatgatgaatccacttggggcctgtcttctggtctctttcatagtcttacccattggctgtagaattctctcagtagtctgtgcttaatctgctggcttatggccacttatcctgagcttcagctttttctgtgtttattttacctgcacaatgtaaagatctgtggtgttttccaaagataatttagtaagagtggcatcgtgtcttttaacatgagttagcttagcacaatttgctttaagccatgtgttctattgagtatgagtttcctctaggtttatattttcagaactcaagctggtgtagtaagggctcaagaaaagttgactgaatgttcttaaacttttagggtaacacaaataatataaacctagagacactttgggtgatatttattgttatgatctaataaatcttgcctggagatcagaaaagcaaatcagtaaagccaccagagagctctcacctctaccaatgctcagacagacggggtgatccaccaatcctcagactgcatctccagactgcactgctcctcaccaaatctcacactgctcctgagactgcactgagctccttatattctctctagtgctgggattaaaggtgtgagctctgtttctcttttagactgactcactctcatgtagtacagggtggccttgagctaacagggacccttctgcctctgtctcctgcagtactgagattaaaggtggggccaccaccgcccatcttctagagctgtggctatctttgcactctgatctccaggcaagctttattagatcataaacaatatatcaccacattttagcctcttttttcttcttccttacttagtttaagtaattcctccttagtttcataaataacatatagcagctggattgagggctcagtgattaagaagatacacaacacacacacatgcacacaatggtagacacacacacatgcacacacatgattcagcatttttcataagtcaggttttcctcagcactttgattttgttttatcaatagaattttggtttgcttgttttccacttttttcttttgtgtttatctgtaaaaaagctaatttgaggggttgagggtgtaacttagtggtggtaaatgtgcaaggttctgggtttgatcccagcatctgaaacaaacaaaaatctaattcattaggaagctgtaggattctactagtgaaggaataaagttaatctaatttgaatctcctttgaaaaacattatgaaactgaagcccagagagctaaatgactggctaatttaggtcttcatagacattttggcaagatctcaaaggacgtgagtcagagtatctaccacagccaggttcctacttgccggccttgtgtgtgcccttggagtaactaaatccatccagattacctgtgacacctcttttcacccttcagctattgtctttttttctctcaggcactctttgcaaaagtctcatgagaagtcgttccctggaaaccatactgttttaatatctgtagtgaggaaccctttgtttccaggtgggccccatccaactcctgcattgttgaacatgttttccctaacgtgaagtcaccagtcggcctgcagtctagcaaccccctttatttatcctgggttcttttctcatacagtataatctgaatacagtttcccgtccgtctactcctcccagtttcttctcacctcctctcccatccagatccactccttccctgtctctcattagaaaagaacaggcttctatgaggtaacagccaaacataacaatataaaatataataagataaaatgaaaaccattgtattgaagttcgataagacaagccaacagacaagtaaaagagccccaagagaaggcactagaatcagagaccgccttgtttacacacacaggagtctggctgtggttctctgtatttgttctcatctgctgcaggaggaagcctctctgacaatgaatctattgagtatagcagaattgttgtcgttattattactatcattatttcaagaccaatagtggttgctttttctctaggtctctgggctgtcctgactctggttcttggtcagccaagcagtgtcaggtatgggttctatcttacggattgggccttaagtcaaatcagacatcagttggttactaccacaaagtttgtaccaccatggcccgagcatattttgcaggcaggacaaattgtagatcagtggttttatggttggtttggtgtttacatttctttttctttttttttttttttttttttttttttttttttttttttttttttttttttttttttttgtagcctgcagagtaactttccatgtaggcactatctctgtctcttcatgttcaatgagttgtgtgggtgttgtctttagcagtgggtcccagctgtcagtttgtggagagtaacctattgtcttggcaataacctcgattgtttggggatttccatgggaccctttcagacacctcaattggatgacacccagtctcgggactgaaagcttttttttttcagtgacaaaagatgactaggaggggttccatctcccttattattgtagatttcattggaatcaccttcatatattacaggaagttcctatactgccccctcaaatgctcttgaattctgtctttctcctcattctctcccctgatcccatttcctctccgccttcctacctggtcctcccattctcacatccatcattgggggtgggcgtgtgctttccatggtgtctttatggaagtcagatgacaacttggtggagtcagttctcctactttttttttttttttcttgttcttgttctttttctttttcctgagctgtctttgtctattatagaactctgtagaccaggctggcctcgaactcatagatcctcctgcctctgcctcccgagtgctgggattaaaggtgtgtaccaccatcattgtgcgtgccagggatcaaatcagtcgtgcttgtgcagcacatgcctctatctgctgagctccttgcaggcccctggggaggttcttgacttgtcagcatacatcatttccttgtggactcctgacagaactctttgatctcttaagctctgattcttctcttgtgcttttgtggaatatgtttcttcttatttaacttgttttccagaactggtagtgacagaaagatcagtccagcttggcagataggtgaattaaaccggttaatgtatctgtctcaaagcaggttgataagaccaaatacacttgttctgtagaatgaataagggatagaaggtaattcagacagctagccattgctgtatgggaagtctaacaagttgtttggaatagagatcatgattctgcatctggaaaaatggtttagtggttaaagtgcttgctagaacccagttaagtgacaggtagccatgctggaccacttaagagttccagccttggctggagagatggctcagaggttaagagcgcccactgctctttcagaggtcctgagttcaattcccagcaaccacatggtggctcacaaccttctgttatgagatctggtgccctcttccggtgtgcagatatacatggaaacagaatgttgtatacataatgaataaaaccttaaagagagagagagagagagagagagagagagagagagagagagagagagagagagagagagagagagagttccagccttgggaagcagaggcagcaaattcccaggcagtgtaactagggagactaacagtactggtgagctctgggtttgaatgagactgtgaacaaagtggaagagcattgaggacgatttatagcatcagcctcagactgccacatgcatccccccccaccccccaccatgtacaacccatacatgatacatgcaaacagaaaaagaaagggagattctgaaagtgactggtattgagcagagggctgttttgatgacaacactaggcattcaactgtgagggcagcacgcagaagctccaaccaaatgcctgaggacagatggaagcaaataaatgctaacatagacctagttatttgagttggatcataagggagaaacagatccaactgacttcgtgccaatccagacaagctaattggctagaattcctcaattcaacaggttcaaattaggctttgtcccagttagaggttgactatgctggtggaaatggaccgattcagtttagacaactaagagagaagtgtctctgacattgctctccaggaaaagcttacagaattttattgataaaaggttttcattttcctctctctttattcctcatggtgcttgaggtctaactcactgcatgctctactgctgacctacatcttcagcccagcgactcttaatattctttgcccttggtcattttacctctactgtcccttcttgcattagtcacttttctattgcagtgctgaaatgccatggccaaggcagcttattaaaggaagagtttatatggcttgtggttccagaggcataagacactatcatgacaggcaactgtggcagcaagtggcaggcatggcagcagcagcaagaagctgagaggtcacatcttgctcctgtggagcagagagcgcaaactagaaatgacatgagttttttgtttttgtttcaagacagggtttctctgtgtagccctggctgtcctgaaaatcactctgtacaacaggctgatctcaaacttagagatctacctatcgctgcctcctgagtgctgggattaaaggcatttatccccaccacccagctagctataaagactatttctttctttttttttgttttgttttgttttgttttttgttttctttctttctttctttttttttttttttttttttttttttttttttgagacagggtttctctgtggctttggaggctgtcctggaactagctattgtagacctggctggtctagaactcacagagatccacctgcctctcaagtgctgggactaaaggcctgcgccaccacctcccggctgacaatttcttaattactttggttttattgctgctatttttcttgagacagagtctaactatgtagctcaggctggcctccagctcatgacactcccacctcaaagaggtaccacatccctgttccttcttctatttttgccctagctgttcttttaaagcaggcagtagcatacctagaagactcccctgtagcaatcttttcacattaaaaaaaaaaaaaaaaaagggctgtattcaaaggtaatgggctgtctcagaagcctgtacaatgttgcctgttctttgggttttaagaggcctgaggtggttgtttttttgtcagcttgacacaagctaggatcatctgagaaaagggaacctcaattgagaagcattggcttacactcaagttgatgggccattttccggactcatgttcatattggtgggggagtgtccagcccactaggcagtgtttctgagttgtgtttaaaaagcaagctgagagccaggcgttggtggcgcacgcctttaatctcagcactcgggaggcagaggcagggggatctctgtgagtttgaggccagcctggtctacagtgcgagtgccaggataggctccaaagctacacagagaaaccctgtctcgaaaaaccaaaaaaaaataaataaataaataaaaggcaagctgagatagccatggggagcatgcttgtaagcagtgttcctccatggttcttccattcctgcccccaggttcctgccctgacatccctcaatggaggactgtgacctataagatgaaataaaccctttcttccccagcgtccaaggtttatcaccacaacggaaagcaagctaggataaggcccaacacattcttggacataatttacattttcatgagtcagagtttgcatatatatgtatcgtaactttacagacttgtttgtttgtttttccatctgtctctagggtggcaatagtttccaaatcatttgaagggaaaactgaccgcacagagcaatggtatggaacccagtacaagcaagaagctataccagaggaagtcattcaggtaggcctcagtcacctgtgaataagcctgagatgtggggaaccaggagaatatgaatgcccctcgatcctccacgtgggttccagagtatggagagtggtggccactgttgtccctactgtcctgggaagagtgaaagaggaactagagagctggagggtaaggttttacatgaagaaatgtgctctggcattttcccatgtgtttatcaaagcacaaggctgtaatagtcttgcagcttcatgcatctaagccctgaagtgtggtgaacacagagttgcacagcaccaggaagacaagagatgaggaagcaggagacatggaaggcaggcgacagctgttgctgctgttccagttccggctggtactcacacactgtcgttaccttttggtagcattgtattttccctcatggtctgattactctttttatcaacataagagaattgtgatttatttccaaacagttgtgcttgcattgcatcctactacattggtcagtttttcaaggctttgcttagctacacagaatctttttctctcttgccttgctgactgtggacccttgagtttgggtctgttactcaaaagtaccagaaaagcttattaagtagtaaacttttttttccagtgatgatacaagaaaagaaatattttttaaagttttatttactgtgtatgcacgatatatatgtggaagtcagaggataactttgtagggccagctctctccttctagctccacatgggttccagggatggagctcaggtatccaggttggtgtgcccagtgtacctgatgagccatctctctggtctaaaaaaaaagcaataatgtaagaaaaaaaatcactgatgcttcagggagctctgatattttgatgccctccaggatgtgactaaatacatattcctaaatgggaggaagctcatcttttttttcagtcggtgctggggctgtaataaactgagaacaaagagagccttctgcttaccaaattctgactgttcacagccttgtgctagagaatttttttaagcttatctggaagtttggcagtgggatggcttgccgtgtgtttcctaccctccactcagcgtttctggagccaagctgccacttaaaagtcttgctcaacatcactgctctccccatgccaaaagacgtatgtgttgacaccaaaattaaacttcagtgtctacaaagctgtgacgtatcagtaggtaacaagtgactggatccagaactattggcacttgtttgcccctttgagttttcaataatgcaaagccctttagttgtgagcctgagcttttcatagctgagccatctctccacccaataatgtgttgtaaattagggatcaactctcagtggcctgtcatctgtcctgctggaaccagttggaaccagttcatgtgtctgtctcgacttaaatcttgtcattgttttacccttgtctttttattttgttttatttcgagacagggtttctctgtatagttttggaggctgtcctggaactcaatctgtagaccagggtggcctcaaactcacagagatccgcctgcctctgcctcccgagtgctgggattaaaggagtgtgccaccaccacccagcttaaccttgtcttgaattatgggctcacctaatactttgcatgtcttctggactaaatgtggcttaggccttacgaagcactgaagtggtgagagtgctcagggtgtaaaagcacttgctgtcaaggctgacgactcaagttcaatccccagaatccacacagtacttggaaggagataattgattcctataggttgtactctgacctccacataggcactgtggtgtgtctgcagctgaatacaaaataagtaagtggaagaagccccattagtctggccttcaggctgtaaatggagtatggattaaatatccctgtgtagatggttattttttaaagagctagagcagatatgatgccatcagtttctctgtgttccacagactcagatttttctttaaacagctgattagaagtgggggggaggggagagatttatagatgaatgtaaagtctttcttagtactagaaagataaactcaagttacaagaaaaatccatcagactctactgatctagttgtagccccttcatatatgacgggagaatgctcctttctgtttgctcacattgagcaaagatactatttttttgttgtttgtagttggtgtctcattgtttagctctagagaagtcacccagactggtgtcttgctggggatccttctacctctgcttcccaaggactcagattacagagtgaaccacatgcttattgttgtagaccaaaacagagtatagcatcatcccaaagacagtggttttaactcttaagttctgttcataattgcttttgtgtgtgtgtattttattattcatccagaaatggcaaaatgctgaactgaatgggaaattcaaacttccaacaaagaatgaatttattcctacgaattttgagattttgtctttagaaaaagatgcaacgtcataccctgctctcattaaggtaatgtgttgaatctgtggtctgattgtttgtttgtttatgatgggcgtttcttcttatgttacccaactctcaaggagccaagtgatcctcttgccttagcccccgaatttcttgtgctatcggcatgtacacataaacagaatcagtggttttaaatgtaaaggtcagacctattacattgagaaatagagagaggtaatttcttctatttggtactttgttgatttaggatttgtcacatcctatgaaatgacagaaatgtagtaaaagaatacaagaaatactatgaagttaaaaatgcaacagcaaacaaaactaccaaacaatagaatctagaggactgctttgttgcagaaaaaagtcagggttctaatggactgtaagtctgttcagaggtccctcttcatgtccactaaagatatgataaagaagtaggtttgtgccacttcatgcaaggttaaatatgaagccaggaaggaagtctgggggatacggggatgctggagagatggctcaaaggataagagcaccaactgctcttccagaggtcctgagttcaattcccagcaaccacatggtggcttacaaccatccgttatgagatctggtgccctcttctggtgtggaagaatacatgcagacataaagctgtatacataataaatccttaaaaaaaaagtcagataaaaccacaagatagactttctgaggatcagggatctgaaagtgacatgggttggtagttctggttcaagttctgtaatgaggttatggttaaggtgctgtctgaggctttgctctttggaaggctaaactagggctggagaattctctcccaggttcagttttgtggttgttaataggctttaggtcgtcagcatataaacttctcaactctgtagagttgtttgatatggcagctggctttccccagatgattgactgaaaaagagaaagtagtgaccaagttgggagccagagtcttacagttgaatcttggggatagagtaccattgagtctgtcgtttttctgtcagttaggcagactaattctgattagagcagaactatacaagggtgaatcccagccagcagggttgtagatcaccctagaggctggctgacacatctatccaaaagatgtcctgggtttctcgggctccaagtgtgcaaaaagatgctgccagaacagttggtatcaatgtctccccatctgtctcttccaccgtgctctcatcaccccattaatggaacgtagagggctagctgctctctgccatgggctgtcaatcttctctctgttctgcttgttaacctggtgcttcaaggttgtggggcaccaggcggtggtggtgcagaggcaggcggatctctgtgagtttcagaccagtctggtctacaagagctagttccaggacagccttcaaagccacagagaaaccccgtctctaaaaatcaaaaaaaaaaaaaaaaaaatcaaggttgtggggcagcagcaaccttcagaataatgaatgtcctttgatgggtgcactgagcagatacttttgtgaagtgtacctctgtttccctaacaaactctttctctgtcacaggatacagccatgagtaaactgtggttcaagcaagatgataaatttttcttgccgaaagcttgtctcaactttgagtttttcaggtatgtatttgactccaatttaggatatcagtaattatattttccttgagttttgtcttcttaagcatccattcttgaaataatgattagatttctcctagacaagaaaaggctgctatgaagtgcttagagtcaaagttaattattccttgcattaatgagtgttcccttcagctgagttgatttatggtagctcttattaggagggtcttcttattcttagcctttgggatttgggaatctggacaagctatagatttatggagaaggttcgttaaggaaagagttaataattggaatgtttttgttggttcatttttttcagttcctgaaacttgcccaaggatgtatgtgttcaaataaataggtgtgtatgggtgcacacacatgcacatacatgcatgtgtgaataaatacacctgtttgtgtgagtaaatgtacacatgaatgtgtttacacacgcacacacacacgcgcgcacacacacacacacacacacacacacacacacacacacacacacacacacacacacaaagagaagggagatggatttttattttttgagataatctcaaaaacatacctcatgtaacaatgtttgtgttttagagaggtccatgaatgaatccttctaacaattgcagagttgaccttcactttctagtatacccttcaaaggagcaaaggccagagaatgccttgactctcacctcattacacaccttgaactagggtcactaaactgcagttttcacattccccaatcctcagacatatgtgcatctcatggctaaatgttagttgttttaaactgctaagtcttagaatgccttagaataatgtaaactaacacggtctagctattctcttgctttagccttagtgttgggattacagacgtatactgccaaacctgactcatactgtaattttacatttctaaaagaaatgttctctaaaaatgaatttatcactgggcagtggtggcacacatcttttatcctagtactcaggaggcagatgcagactgatctctttgagtgtgaggcctgtagaacaaatttcagtgtagccagggttacacagagaaaccttgtcttgaataagtagaagaaggaaaggaagattgtatgtgtgtgtgttgtgtgtgtcctttttatcttttcaaaattaggattaaattatgtatactttatacattaaattgtgtatacttaaaaattacagtttttaagacctggtgaacaatatgtacttgtataatatctgattgttatatatttgagccagaatttacatatttcagtggaatcatgtctcttaaaagttaaacttttggcctattccagtgccctgcacacacagttgtataacttggtattttaggacatttgtaattcttttctgaggcactactgactttcaaccccacctgacatcatggccttactttgttttgatgggttggcattctcacccccaccccaccccgaaatccactgtgtgtgtgtgtggggggtgtataatgccttaagtttaaagctcctcattgcttaaagaacatgtcattgtatgcaatactgtaagagaattaaaacaaggtcagagagataacttagcaggtaaaggtattgccactaagcctgataatctgagtttggtcctaggactcatatggcagaagagaaatagctaccaaaattcagttgacttctgaattttatatgtgccatataatagataatagatgtgtacacagatagatgaatttattttttaaaagagagaattaaatggcaatatccatttagatatttttttctcttgaactttattcattgctttttttccataaccctgtcaccacctggtatatcagacttgagcttattgcttgtctcttccagttaagctataaaccctgagcagtcctcatctgctctgagtgcctagagagcactgtagtaagtgtgtagtgacgcatactgttgagtgcatggcgctttccttggtgttgataaaggtaagcggtgttgtatagtcaactaagcagcctaacttatgtttgaatcctaaaccttggtgctgccaacccaggtgccccggggaaaacagcttcctgtctgagagataaaagttgatatctagttctattcacctgttatatgctacaattgcttctcctttcatacactctcacatagatattttcatactgtaattttttttaatcctagctactttattaatgtttgttctggtagttctgtacttctgttgattaggggtaagctaatattttcacaattctgttaaatctttctgttttaaggctgtacagttaaagcacacaggcttctcagtcacatctttctgtactttaagagagtagcttgcttggagagagaagacatgccgatgttggatcaactcactcagttatgcctcctcccagccgctgaaggacggccaagcactttaaccttttccttttctcacctgcctttcctttctagctggtcacttctccatgccagtggctctcaacctgtaggttgtgggcctttcacaggggtcagataccagatattctgcatattagatatttatatcaccattcataaccgtagtaaacctacagttgtgaaatagcaatgatacatatttatggttggggtctccacaggataaggaactatctaaagggtcacagtatcgggaaggttgaaggccacttggcctatgccatctgaggtaatcacttctttcttcactgccaccaatgcacacatgtagcgtatttctgacatcttccttcttagacctttttctcctcatgacaaaaagaaacagattcaagaattcaaccatgtcttcaggaaagtgcataagctaacattcagtttctccgcctgtctcaaaaggccgtggtccattgggaagtagtacatcagcctttcactgtcgacattttcttccagcccatttgcttatgtggaccccttgcactgtaacatggcctatttgtaccttgagcttctcaaagactcactcaacgagtatgcatatgcagcagagctagcgggcctgagctatgacctccaaaataccatctatgggatgtatgtaagtacccatgtctcagccttccactcagcaacatttttatattgatttgatggaagcacttttcatagtgggtatgagtttaatttcttttaaacaccttcatggcttatcatattttctcttaatttttacattagcttttattctaacattccactgtgtaccgctcatagtatgcagagttgttttttttttttttaacatctttcatcagaatgtcatatttttctcctcaaacaaaattgtgcccgatctaggtttagctctcacccattctgtacctgagatcttgagtttcagaaaacaaaatgaagtcatgtctttgtaaaatgcgaggttggcctgccctgtctcctcagaaggcagagcgtgaggctgcatatccatactctccggtcacgtttcctcattgtcatgccaccgtgtgaggcgtcaaagagtttcttttgtttttctttttgttagtcgctacatttatgctgatcctctccattgcaacatgacatacctgtttatcaggttattgaaggatgatttaaaagagtatacatatgcagcacgcctgtcaggtttgagctatgccattgcatcaggaatgaatgcaatacttgtaagtaaaatgcaaactgaagaaaaggcaccaccctgttagagctttctgttgagcttgggaaactattaacgcctgcatctttaaacacgaaggctgatggttttcttcctgcaccttttcagtgactgtaagattcaaattaattttagcccactaataagtgactgggagaccttagtgcatcgtgtgaacatgtatgtgtgctacgtgtatgtgcatgttctgtttgagatgcttaacatactaatcctaaaagcatgtttttctcccagtgtatttgagtctttttccattcataagtaaaagctatttgtcattactgtggtgcttgaattacataagcatcttttgtttctatagacagtagtagaaagttctgtgttcagatccacctggcagtttattgtgtggcatgtttcactaactgctttacgtgtgttattcctacatcctaccctggatgatatctcagtttcaaattaacatctgtttaatggcacacattcattctcactggtcttgaaagcatgcatttagtcaaaactgagatgagcacatattccaaaacttaaattttcatttatttttcagtagcgttccttttctttttatcaacattatttttcaggtagttgtttaatgtataagaataagtatagtctaaccatcttcagattctacagattgaaacttagagatcaaaactaccaacaaatattaaagtggcagtcgattttgtttctcgatagtggcttttagcagctattagcatttatttctgataaagcaggctttctgatggttgttatagttctgtggccaaggccttccactctagctgtggatcttgactgccattccttagagggaggttcttaccgtatatcctgtgttgctctgggtgctgcacacagatatgtaatcatagcctttccctgccttgcagagattctaaggcgaaatcctcatggtatatacactgtattttcctgacaaatttgtttctattggcatctagaacatataataaaataagcaagtaattaagattgtggttccttaacagataacactaaataagagcagcatcaggctatgaaatataaaattagggctgcctgatttttttttttttttctcaagatgtttttttcccttagaggaggcaggtagttgagacagggtcttgctgtgtgttcctgactagtctgaaactggctgagtaaaccaaactgacctcagacatggagttgcctgactcctagttacatccagccagagctgattatttaaatatttctaaacagttcggggatgtgtcccctgtgatttctgccttcttactacattcataaaagtattgtactgtcatcagagagtctttcttaagagaaaatttaggagttttgggtttcactccatagaggagtgtatacttagcatggccctggagttctgtctctaacacaaaaaagaaaagataaaatttaaaacaccttctgtaattaaatttgaggcagtgagaacatatgaatgttgtggtgtggcaggtgccactctctcttggtatcaggtgagtttacctactgttgactttacttggaaaagggtgttgtttaatatgaaggtgactagtgttaaattgagcttataatacttaatatacctagtattgggattttgaaagtgtttttaaaatcaagcttaagatgaagttgttggatgttttgtaaagtttgaattccttcatctctttctgtagctctcagtgaagggttacaatgacaaacagccaattttgctgaagaagattactgaaaaaatggctacttttgagattgataaaaagagatttgaaattatcaaagaggcggtgagtcctataacttttttctataatttttattaatacagttgcattgttacaaaaattgctaataatggagagaggattgggggaaaagcatttatagtcctgagttatcgtctttgctatattcagcttagaaagctgagcccactagtagacacctgactgtcagcttcaaaacctactagggttgcagagctaactctgccggagctccagtggcagtgagactttttagttttcaccccaaccttcatttcagacaaacacatgcttgggaagacagaggtctgcctaccagaagagctttcttactttgtagggcaccctttagggttgatgtgtcttccactgaaatccatgtcatgattaatggaagtacagaatggataggtactttcagccaagaccttcatttatatgccataataaactgtcagttttcagttgggcatccagtagctactacccatgttatttgcttatggagaccttggagatgtgctgtatgcaaggatccctgggaattactttctaaggcatgcaagatatcccatagtgaaggcatttagatacacgtcagatgccagaggttaagacgctgcctggacaatgaaaatgtgtgcccgttagtttaagaaccagagaagggtagttactgttcctgattatatagaagagaaagaagtaaatatccttgcattccagttacacataatttatgtagaagttggattgcagctgattttttaattgactttgaacccatgcttcccttccctagtatatgcgatctcttaataatttccgggctgagcaacctcaccagcatgccatgtattacctccgcctgctgatgactgaagtggcctggactaaagatgagttaaaagaagccctggacggtgagattccttcttcattatttcataccatgattctagtcattcctttgtctacgggctaggtagcaagagcctcagaacttcatatggttcagtgacacttaccaactgcctccacacgcagccctgcccatgggttaaacagccatcaattagaagggtcggggactagggttgggaagcatgagcagagagatcatttggatgaagatgagataggagagtgttatgctaggaggctagaggaggggttcccaaggcagcacagtgggagtggagtgggtgctccagctcagtgacgttagataagaaacagcttcaggtgtgtgtgtgtgtgtgtgtgtgtgtgtgtgtgtgtgtgtgtgtgtgtgttgtaaaattaagatagtattcatacttttgtattgaaaataacatctgtaaaaatacctgacccatcatgggtatttaactaattaacttaattagttcctaaagaagaaccagcacgtgtaaaaggaatgtgagaagtaggaacattactactgggacactgtataacaattgccacaggcagtgtccacctgcaaatgctaaaattagtaaaaatttgagggaaatccagcgagtgagattgctcagtgggtaaggggttcgccaccatgcctgatgacttgagttgaattccccagtacctatgtggtgggaagacagaactgactcctctgtgttgtcctctgacccctattttcagcaccaccaccacttacatgagttgctactctccaccccagaccaccgcacataataaacaactaaataaataaataaataaataaataaatagtgtaagacaactcttaatttaaaaaaaatttttgagggaaagctgtctcaaactttcttcaaacagattaattctaatggaaaaatttggtttggctttgataggctttggaagtaggcactttcaaattgcttgttgaacaaacatgagtcactccattattacctaaagaataaaatagtacatttacttaaaacacccgctgacaccaccttacccagcaccatgacatccccacctcagcagctggatgcacgctgcctctggatgcatgcttccttcaagctagtacataaatgtagtttgatcttgagaagacactagataaataaaggagttctgaggaactgtctccagtgagagaacaataagactatgcagcagctaatttcaatataggattataggttagatcctagagagaaaagggacattgatataaaaactgaaatccaagaccaggattgatggggaacaccttaatcctagcactttggtgcagagacaggtagatcctggtgagttcaaggccagcctggtctatctacttagcaaattctagaccagccagggctacacagtaagaccatgtttcaaaaaacaaacaacaacaaaaacttcagattgaaatccaattaaagccagtacttgggttaacagtattattgtattaggtgggtagagtgcttgcctagcatgtgcaaagccttgggattgatgtataggaccttgcaaaaaacacagtgtatatcagaattgattgcttaggatttgataatcaatattgtggttattgaaagatgataacattagataaaactgactgaagggtgaaatactctagtacttttgcaaaccttatataagtctgaaattatttctaatacaaagttttgttttaagatttgtatgcagatcttactatttctttcatatttacagatgttaccctcccccgacttaaggccttcatacctcagctactgtcacggctgcacattgaagcccttctccatggaaacataacaaagcaggtgcgaggtgaagttttagcagtcttttgtggatcactgtaagagattatttcttctattctgtctcaagacatagccagcacaatgctaggcacacaagaattaatcagctttctctgtggaagaaggtaggaaggacctgcaagaaatagaagtagggtagctaagtgaggctcatagctatctttactgctgctgcctgtcctgtgcagtcaaagaaggaatggaaataattgtccctactgtgtatagactcacataatgtagaagtcaggcagcctgcatacaagtcctgacactgccacacactagatctgtaatctcacgaaaaggcctcacctccactctgcaagtcagagtggtagcaacacctacagcatgggttacaaagatttgaatagcacatggaaaacactagaagatccccatggcagtctgtctcaagagcctttactccctaccactctatatggcctccaaaacagtatgcccaggggcagatgcttgttcagcttagtttaataactcacaatatactcctatgtttatctcttttgtttggcttctatgctcaagattcctgacatggcactaacttttccttaccagtacttctgtctttagaaatgcctttattccctgccaccggtactatgtagatgattgcttggatttctgtttcttttcactactaccgtattggtagataaactcaatttttatccatttccataggatgagatgaatttaatagttaaaaatctatttatatggtcatctaaggtactttataagtatgttttcattattataatgggctatccggtattctgttttgattttcacagacaggttatactcggatttttttataatatgctgtgatgtttcttctccttcaggctgcattaggaattatgcagatggtagaggacacccttgttgagcatgctcacaccaagcctctccttccaagtcagctagttcgctacagagaagttcagctccctgacagtaagtgagatgttaaaactttgaaaatggactgctcttgtgtagtaaggtgcttgttgagttgagtgagttgagtacacttggaaaataatatatgctttcatgtcagagatctatagtaaacctctataatttatagaaataggattacaagtagataggtttgctagagaattctctgattggtgagccatgtacatgaaattggaggcagttgatgattttgaggagatggatactggaactcactagtacttgaatatagaggagttagagaataaaactgtgtgtcaggtggtgtggcacactcagaaggcagaagcaggcagatctctgtgagtttgagggcagtgtgtggtacaaagagagttccaggacagccagaactgttacacaagaaaacagccgatgagatatgaactgtgaacactggagaggtggctcatcgggtccggtcaggcactgttcctgcaaagaacctgactttggttcccaacacccatgttggggcgggggttgtgcttaaaatttcctgtgattccagttccagggaatctgatgctctctggcctccacaggtacctgcactcacattcacagatacacacacacacacacacacacacacacacacacacacacacactcacattcacagatacacacacacacacactcacacacacacacactcacattcacagatacacacacacacacacacacacacacacacacacacacacactcaatcaatcaatcaatcaatcaatcttgggaaacagaagactttcaggctagccagggctacctagtaagaatcttgtgtaaaagaaagctggctggatgtggtttagctggtagagtgcttgcccagcacacacaaagcctttgatttgaccctggcataggataaaagtgagcatgggtggtgcatttgtaatctcagcacttgggaagtggaagcaggagagtgagaaatcaagacagtgttagaaaccagcctggggtaaatgagacgctgggtcagaaataaaaattgaggaaaactaagaagcagctgaaatcatggcacccattgaagtctgttggaattgttggcagtagttttagaataatcacaagtacagaaaacaacatattcctaatatgtatatttttctaaggggataacattagaaagtacttttatttatatgttgggacttaaaatgtcagattatagtacattaacagtggcttcttttgatataaaaacttaatgaacattgtttcattgtggaaaactcttaacatactagaccaggagtgagggcattggtgctctttggccacacttcattgttggtgttccatgtgcttgcattgtctatgtttcctgctcagagctcttttacctcctaaaatggtgtcccttcgcccctccccctgattctcagggacctgtgtctagattctggtcctcttccctggcctgtcatactcctctattttagtcgtttttgcataactatgacaaaatacccaatctacaataaggaaacagtttgttttgaatcacagttttcaaagttccgggtcatgggtagttggccatttgcttttgtacctatgacaaagcagcatatcatggtaggaggacatggtgaaggagttcctcgcctcatggcagccaggagataaagggaaggggaggccagtgtcctttccactaggtcccaccaaataaaaaagcatttaccaccttccagtagcatctaaggctgggcaccacgctgtaggctgggatgcagcgttagggcatctgtccagcatgtgtaaggtgacttgggccaaaccataaccgccactacactttctctgacatcctcagctggaataactacctgtgaatttctctgaactctttgaagctctcagcacttttactctttcatgtggattaaagggcaacaccagtttatgagattatacattcctttaaagccagggtttctgccttgagtagctactgaatgattcaaatatgttattacttcacgccacctttgttgagcacagctagttctgctgtcctgactggccggtcatcaaaaagcaggtgatggttattggttgctgcttttagtgtgttcctcagtcagggcacacatggcaaagaggaagatttagtaactgctgagtcagagccatcccattgggctgagcatggagctctgaggttgagcacatatttaatggcgggtggggtggtcctgggttcaagcctcaaaccaaaaggaaaaagaaactgcagcatttacctctactcaaagtgagtgatccagtctagaacagaatttcaaaatggagtttttcatgctccttccttcctttcctcttttaggaccctgtcttttgcctcctgattgctctgtcaaattccctcaagctcagaaatagtagagtttacatctcattctcaaaatgaaggtgttagcagatccctttgatttagccaactgcagatgtcatgtttaagtaccctcacctgatgcacctgggaggcgcctacagttagaaagcagcgtcttctgcgccatgaaaggaaatatttgagatatgtgtgaagaagaaggaaagacggctccttgagcccacgagtcctcccctcttctgaggaggaatgtcattgccaatttacatcaggaaatagtttataaagccaagcacatctggcacatgcctgaaatcctagcactgggttgtagcaggtagccaaagccagcttcaaccacatagcaaattgaagacctggctgggctatgtgagacactatctcaaaaaaaaaaaaacctttttttttaaggaaagaaaatttagagagggtgtggtggagcacacatgtaatctcagcactcatgaggcaaaggcagaagggttccaaggccagcctggctgtatgaatttgctttctgtcactgtaataaaacactgaccaaaaccaacctcggattacaggttacagttaatcaaccagggaagccaaggcaagagcttggggcaggtgcttgaagtagaactgtggaggaagttccctgtttcctggcttacttctcatggcttactcagccacctttctggtgttttttttatttgtttgttttttaacaatgaccttggctggtctggaactcactaggtaaaccaaactggcctcagactcataaaggtcagtctgcctctgcctcccaagtgctggaattacagtcatgtaccatcacacctggcttggctactcttcttatacagcccaggactacctacccaagtgtggctcctcccacagtgggctacagtgtaccaggttgagctgtactctcccctgtaaattacccgtcaagaaaatgctccacagatgtcctcagatcagtctgatggagtcagttcctcaagtgagattccttcttcccaagtatgtctagatttatatccaattgatgaaaactaactagcacatgggttatataagagcaagttcaagaccagccttagctatctggtgaggctttgtctcaaaaaatactaagacagaaaaacaaaaactggtaaatataccattagctttattaaatcacaaatatttcttttctttttgaaacttcttaggaggatggtttgtttaccagcagaggaatgaagttcacaataactgtggcattgagatctactaccagacagacatgcagagcacctcggagaacatgttcctggagcttttctgtcagattatctctgagccttgcttcaacaccctgcgcaccaaggagcagctgggtgagaaggcaatggggatcgcagggtactggagactgcaatgaacagcttttattctcagcagacatttcccacttggagagtcacatggcatggtgtatcaagcctgctgtatctagagatacttgtgaaaaccttgtttatagggagctgcttctaaaagatgaacagttgatatcttgcagatacaggaactgttactctttttcttctttatacccctcctcttcctttctttttcatggtgaggagattgaatacagtctgctcttcaggtgctaggcatgtccttagccctagtgttgaagtgattcttaatgcagtgatgccagacttccattggctgccataaagaggacatcttagctatagggagggaaggaagagtgcgaagagcaggcttctaggtagggaggcgggaagccagtcctacaggggaatttcgcttagctttgccacactttgagtttctgagggcaggtgttatctcttcctcatcctgtatcccaggctcaggaggaactaagtgcttgcggttttagacacggttaaaagtcttggagatgctgacaggtttgattgatgaggaaagcgttcacacttggaaggtgaaggaaggtaaagtgtcgtcctctgcttcttagacagttctaggccattctgaaaagaaacatgagacccaatcaaaaagccaaacagctagaacaaagggaagttcaaagaaacccccataatagcctggaagaaacattttgaaaggatatggctatctctctccacataccctagcgttgtgctgaacatggtaaatggacacattgtggatagtcctgccttttaaggagctcaaaatggctgacctatagaggcatgattatgtttcagtgttcaaacaccaaagcttctgaagagagcaacatccccagaggccccaggtcccagactgtctttggtgggagatctgtgcagagctgctgaaggaaaaagccaagaactaaatggagaaaagggttgggggtgttaactgtgagggcaaggtgactggtgccctatgaggactgctgtgtcctcacacgatgatacgaacccattggttgctgcagtctggtgtgcataggggctgctcgctgtctgtgactgcctgttgtgcttcacacactgttgggaactccacgtctccatcgtgtctcacacactgtccgtagctaaggagtggagcctctgcatctccaagctctctcaggcctgtatctacagcctgactacctaagtgccgtgcctgccccagacctgtacatggtttgaagtgcttagcatgttctcctggtctggtgtcacagccacagactacgattgttgcttctgggccacagtgggtgcctagttgcatgtgctgagcctgctaccagttatacactggaattccattctggcaaggcggctttctatgactgcaaaggctattattacctggcctcatctaggcccagtgatatacatgagacaggaaagaccaccaaggtgggcaaggagaagacctttatcctgaaacagctgtacccaggtttgcttcaggtaccaactagaggagcttgtccatgtgccagaacacgaaactgttgactactcacaatgaagagactgactaagacactttgagtgcacctgctgcatgcacagtggcaagagttggatgctaaaagccaccagggaatgcactttgctgtgcacctaggaggcctgatgctcctttggcatcacgtgaagatgactgctgcatcgcattgcagtcatccagtggaaagtctgtgactgtcccactcagagatgaaggcctcttccccacaaacctcaccagcagtcctccctgttccgtagaaaatatggtgtgactggttgccacagacccacaggtgccttggacaccaaccactgtaactgaaagcctgtgccccaattgtgaacactgtttgcttcatatgggtagctcctctagaccctgccatatacaggtgttcaggaccccagtgtggttccctatgaggtatcgcccacctctgatagtttaagagaaaagaaatctacatggacttttcttctggctgtcaaaaccttgtctacatttagaacttttccgtggtgatttttatattgcatgcttcactactgaatttgagcaggaagatggacctagagtgactttgaactagaaagaacaaaataaaataatgtcagtcttcaaaagttgggaggtgaggggtaaaaaaaatgaattggggaggggtgtgtataagcacacaagctgttgatagatctgtgaccattggtttgccctgtcctagagagtcgggtaacccagagctggtccaggaatagatcaagtaaatgcattgtagagccagggtcatgtgaggaactcagatgttaaagcagcagagttaggatttggctggggcatgaagtgagcccagcagtttgcagggataaggataacaagtttagacagtcgacagagaaaagtcacagaatgtgagtttgaaagatggacagggtcagcctcaagcctcagctgagcccctcagctcggtcctaaggaagaagaccatgtcttaaatggtcgtatttcttcagatgtgaacaagctaaagtagattttcttttctctggaagactaaaagtggtgtgagtctagtgccaagatcctgactgtgtgtgtgtgtgtatacttcaggctatattgtcttcagtggacctcgccgagccaatggcatccagggcttgcgattcatcatccagtcagaaaaaccacctcactacctggaaagcagagtggaagccttcttacttaccatggagaaggccatagaggacatgacagaggaggccttccagaaacacattcaagcactagccattcgtcgactcgacaaaccaaagaaactctctgcagagtgtgctaaatactggggggagatcatctcacagcagtacaattatgacagaggtaacgtcaaaagagctccattatggcatgtgggtataaaatttgagagcatgagagcatcaaagccattctatatggcatttgttttgtgggtgtttcagtattgatttagcagcagggtaggtctgcacttcttttaaaaatgtgttttttaaaaattattatttatttaatgtaacaacaatttcctgctggaaaccaccttctccaaaactaaagctggtctctatgtttcacattaatttcactattttctattagtgtagcctgactcaacactgacacaagaatatctatttcccatatgtgactggggggaaatgcagattaaatgtccacagagcaagtgctacccctgcagagttcaggaatctccaaagctctccattctcagatgtaaaagagctatgcattggagggtcccgagtggccgattccattcccatttcattacagaagaggttaagcaatgaagctgaaacacattcgatatcagagacagttttgtcctggcaccaccaagctgactgccttgacccgttgctgttgttgccttactttccttacctgtgttttgttgttgttttgttttgttttattttactgagacaaggtctcactacatacctttggctggtctggagtttgctgtgcagactgggctaccctcaaactcatagagatcctaattctgcctgcattagcatttcaagtattgggactaaaagcatgcaatactgtacctgacctttatctgtggtttttctagcagttggatctactactaatgatggctaccttgtttgaacatttaccttgtgcctggtatcatttgtcacgtcaccttcttggttgtcattataaccttactaagtggttgttaccttcagtctcaagataaggcaaccaaggtgtagaaaactcaaagtgactggttccagatctagcatctcacgggggtcaattgaacccagttcccaagccaagtcttaactactgtagcacagtaaattacttttcttggaatctatcccctgcttacttagcagatggtggctttaaaatgtggatatctggccaggcaggggtgacacacacctttaatatcagcacttgggaggcagggtgggtggatatatgtgagtttgaggccagcctggtctactgagtgagttccaggacaaccaaggctacacagagaaaacctaggctgggctggagagaagagtgacaggtgtcttagcctgagcttaatccctggaacccttaggtggaaggagacacccagccaaaagccgtgctgtgacctttacacagacacacaaatgaaaataagtctttaaaatcatggatactcaacaggcgtagagtgaaatgtattgtctttcagtgcagtattttagactgttcaatgtaaaaaatattaattactgcttggttggttaccttttcagataacatagaagttgcatatttaaagacacttaccaaggatgatatcatcaaattctacaaggttggtggctttgttatctagatttttatcttattttctaattagtatttatatgtttaatgtgtatgtgtatacgtgtgcggttcatgcatgtcaaagtcaaggcagcttgtaaaagtagtttctctctaccatgtggggcccaggttgtcaggcttggaagcaagcaccttttcccacttgagccatctcattgactcctaagttttggttggtaatgaactacttgctgtactgtgtatttgaactcgttcagactggatttatgaaagcgttttatagaatttaggatttgacactttgacctatttctgttagatccagtcccctctgcattttggagactataatggctggctcttccagtttccaagctcccatttccaggctcttttgctgtcttctgccatgctgtttaaatatataacattgccaagcttttcagtgggcaaggagagcaaaggaaacaagacactggtcagcttgtttttcatactgatagtgagcagtgctcccaagtttccagtgtctgtgcttcctgcgaaggctacagagaaaggagaggcgctgccattagggtcttccggcacagctttaagagaatcattgttctatctaagtctctacctccctaatgacgtaagagtagtgtataaaatgagtacatgtcctagttagggttagcaatagctgtgatgaaacaccatagccaaagcaacctgaagaggaaagggtttattaggcttacgctcccacattgcagttcatcattggaagaagtcaggacaggaattcaaacagggcaggaagcaggaggcaggagctgttgcagaggccatggaggggcgctgtttctgttttgctccccatggcttggtcagcctgctttcttacagaacgcaggaccagcagcccagggatggcacccaccctgggctcggccttcaccaatgaatcaccaattgaggaaatgctcttcaggctttcgtacagttggatcttatggggcattttctcagtcgaggtttcctctcaagatgactacagcttgtgtcaagttgacataaaactaggcagtacaacatgtcaaatgaatttcaaaatttatgccacagtagagttgtacttacttgaagtgttgcttgttctttgtgatttgttagaacctctaatttacataaagtacttttatgcttgatttaggataaagaaaaaattatagtctgcaattaccttagcaccagggaactgccacccaagttctagccacttagcctggattatatttgtgattatgagctgtctgatcaggaactatgtgctgctatgctcaaatctttcagggagagatatctgtagtgtcgttttccagtgctttgtcgtggaggcgcttgcagttctcttaaggatgggtgtatggagagtgaggactacctagttacatctagggctttccacaccccttcagtccatcaccagtggagctgtggcaggaggagagtcaagaaaagaaaacagggctggacagtggtggcgcacaaccttaatcgcagggctcaggaggcagaggcagggggatctctatgctttcgagaccagcttggtctccagaactagttctaggacaggttccaaggctacacagagaagctctgtctcgagaaaccagaaaaggaaagaaaacagccctgacttggaagtttcatagacaaaactgattagtttatactgtccacagtcaccaatgcctctttcccctcgtgtgtaaaaccacaaagctgctgttttctgggtgtgcaaaaaggtattagtgaagtcacatcaccctgacaatacagaagggggaatatagagctagaaagggaactcagtggtaaagtgattactgtataagcaagaggacctgagttcaggccccaggacccatgtagtaagcatgcctgagccccccacacacaaaaggagactatgtctcaaaacaaacaagatttcttttttattgtgttgaggggatatttgctcatgagtgaaggtgttctcggaggccagaagggatcattggatcctctggaactggggttataggcagttgtgagcagcctgacattggtacttagagcaactcagttgctctgagttcatcttaaaacactgagtcatttctcaagcccttgttttgctttttatggcaggaactcattctatagtctatgctggccttgaactcaaaacattcctgcctctgcctctgcctctgcctctgcctctgcctctttggggctgtgggataatagccatgtatacatctgtttagaatacatgtttttgagtgatgatatctgagccatttagggggtagaaatggatggccaaactcattacttctgttgaagtaagaggggtcaagaatagattttttttttatgtcgcgtatgatggcacatgcctttagtaaaagtggcatatggatgaatctctgacttgaaggctagcctgctttacttagagagttccaggccagccaaggctacacagtgagaccctgtcttttatggcagggggcagtgtgtgttggggggggtagagagaaggtctcactatgtagctctggctgttcttgaactactctgtggaccagactggcctcaactcacgagatccacctgccttcctcctgagtgctgggatcaaaggtgtgcaccattcacagggctaagaccctgtggttgttgttttgtttgttttaggaagtaaactttttactagagtaagaagttctcagacaaggtattccatggtgctggatacaggtccttgagcttctaaaagaagaggtcagagcagccttagaaatctagtccacgctctgtcaggaactggggaagctggggtccgacttgctacactacagcagcaaggcttcctttagatacccagaagcagttttatgataattgtctactcacagctgtagagtggatttggtttgtctcatgatctttcccctctgagaagacaacatgtttcattggctaaggcttcagaagaagcttcgtcacaatgatcacccctttggcaatcgtagtaatgttccagccttagggaaaggtctggagaatctctcctagctctgctgtcatttgaggctgtaagcaaagggaatccttcaaaagaacctagagatgcttgcaagctgttgactcaagcaccgcagttgtcattgagcccaatcattagcatgagcagcatcgtgacagcttactgagaataatgcaggagactgccatatacaaggcacgacttacccagtattcgtttcctgtccctgtgataaatgaggagccacagcttaccagcagacccttggtgcagaatttgacagttcttagagaaacaaggacagtgatctgagtgaagattgctagaggagccagcactgggtaggctgaggcaggaggattgcaagtttaaggcctacctgggctgcatagtaatactccgtcttttaaaaaagaaagaaagaaaaggtagggataaagaattgtttacgatcactaggtggcccagacatgaggtggctcagcagataaaggcacccaccataaagcctgaccccaaaaggtagatggagagggtagacttcagatagttgtcctctaacttccacactgtgcccatctccacagataataaatgtaagaaaagatcagccaggcatggtggcacatgcctataattacaggatttgggaggcagaagtgggctgatctctgtgagttgtccaggccaggctggtctacatattgagttctaggccagtcagggctatgtagtgagaccctatctgaaaaaacgaccactagtaaatactgaagtagttgtgtagactcaggcatatattaactatgagttgagcaaatcacttaattcccttgggcttggttcctcatctataaaaatgggaatgactcttggcagtgctaggggtaggtatagcccagtgatagagcatctgcctggcatgagtgaggttctgggttcaattccaaccacctcaaaaaaagaaaattaagtcttgcctgcctccttgaatcttttagagtaaaatcacacgagaggaaagaaaagagggcctcagagagaactttgttctaagtttcttaacagcataagaaggtgaccttggttttctttgtgcttaggaaatgttggccgtggatgcaccaaggagacataaagtatccgtccatgttcttgccagggaaatggattcttgtaagtattggctactgacgttttaaaaattccatttttaatctgatattgagccatatgatggctgtcccttaccatagtaactcgccttacaaagcaccagaaagtgaagacacataaacaagacaagcagaagttcagggggaggggggacggagtgataaagaagtcatctccagaagtggctgtggggaaggcctgcaggtgcggctcacctgccccgtcctcctctcttgctttcccagaaggtcagtgcctcagagtctaatcaggtcagacctgggctctagaaatgcgaggccaaggttatatggcctcagaggcaccaacatggagcgggtgcttggcaggatctgaaaagtgtgttaaaggcctggtatggtttattttttaaatgacctaagtctatcttggatttttttaaaattgatcttgttgcaagtatggagtaaatagtaagttttggtttccttccaggtcctgttgttggagagttcccccctcagaatgatataaacttgtcagaagcgccagccttgccacaggtaagaaacatcaggcattgtcggagttcttcctacttagaaagagctcattcaccagaacacgtgaaaacctagaggttcaggtcactagtattgaagctacttcaggtcttctcgaatgttccatcactcagcctttgcccttgtctgcctttgcctctgttttcttttgtttgggggtcatgtagcgcaggctggcctgaaactcagtgtagctgaagctggtttgaactcctaatccccctacctcgacctcacaaatactaggaatgcagggttgctcctctacttctgtctttgcctctggcctggactgtgtcactctgcacgaagccatctccagcctagctttcccagatttgactactggagtgagagtgtgtggcccttcctatagtgtctccgtatttaataatcttgaaagactagcatttacttgaagggtgagaaaatgggcaaagtcatcagacttctgctgggtggtcgagtcagcctgtatctgcccaggcgaaagccaagagttagttgtcttctggcccagggccccatgcactgagtctctgcagactcacccatgaccctccggcctgggtgcagtattgtaaacaccgcctcctccccaacaccccagcctcccaccaaaagttgatatgctgttcagtataatttttaaatgaaacactaaagaaaacttttttttccttttcagcctgaagtggttcataacatgacagagttcaagcgtggcctgccactgtttccccttgtgaagccacatattaatttcatggctgcaaagctctgaagagagtggatacgttcctgtatctttcagggctgggggagcagtcttaaccacttgagtagtttctggcttgctattagagagacaaacagaaaagagttatcagacgttattatgtagaaatgttaaaaacccaaagtaataaaattataaaatcttatagatgtagaatatttttaaaatacatgcctcttaaatatcctaatttttttcctttttagtcctaagagaaattcccttatatcaactgtttaatctgcagaagggtatcctaatagaatcttttttccttattctgtaaaatagtcacttgtctgaagaaaataagagcttttttctaaaaggcttcaaaacatttagaaaggattacctttttaagaactgatcctcaaatctgctttgtatttgatagtttcctgtaaaccgacagaaaacattacatttggcagataatgcacaaagcaatgtcattttcgtttattagtgaaattgctgattatctaaggcatggttttaatgtttttataaaatttgggtatgttttttaatcttcttagtcaaatgctggaaagccctcgagcacacccgatttacagtgctagaaacacaggtcagccttccatcaagctcggatttctcaggattcctgtgggttcttctctcgttgaattctgttgacgtttctggttttcgtagttggtttttggtgttccatcagcagatgtttgctgctgtgtagcgtgtgagacatgctgtgctaacgtcacctgttgtgacccccagaactcctagggtgaattttcgatcagtctgtgaactaaatcatttgcccctttaagggacttaaaaggcagcaaatacaaagccacctctttggagatataaaacggttacattcttacatagcagtctccgaaagactctaaattcccttgctgcttccagtctcatcttgccttaagtgttatttttttgaatatatgaatataaacatacagatgatgactggggtggacttttaaagaatatttttctcacaagaatactattttaggtgaaaatgttactgtagatttaacagctgttttaaaatatttgctattattaaaacttgcttcaagaacaagcgtggctatgtttctacacacaggcaatagtaatagaaagtgctcctgtttgtccaccaactcaggcaaagtgcagaatggcgtttccaagtgacatttgactgccccgtatgacttgatttgccaggattttctgctaaagagtcttggctattcacagcttaagttttcatatttgccattttccaaacaacgtgaacttgggcggctgtggaggccgctctccccgtggtgctgcgatgtcttctatccacgtgttttagagtctcccggtgagaaacctgttcttgtctgtcccatcagaaggtgtgagtcatcatttccttctcgtctaagcaattggccaagcagccaaggctgactttgaactcctgatcctcctgcctccacttctcaagtgccgggattaggcgtgcgtcaccccgcccagcgtgactatgcagcttttcatcgaactgcaaaatatatacaagacaaatctaaaattagttctgagtatttgaatccatcagtgtaaaagcagatagcagtctgctaccttttctgtaaatgattacatgccgttgagtaacttagctcatttttaaaagatgggtacagttaaaagcatgtcttttgtatgagaagaggcacttgaagagactggaaaacaattccatgttgcttctgtgaacctgcccatggtgttcagtgtgctctagagctcctgtgtgtcacctgacatcctgaccggttcatctcagcgggtccaggttgtggtccatgaacaagaacagactacccagagactgccgtgtactcaagcttagcaagcgagatttgcgaaaaagtcacgagttaccagagacttaaaaaaaagtctttttaatcagttgatgtgtaagagcatgtgacactgccagtatggtgaggtcctggggttaccctgtttacaataaatctcctgaaccgaaactctctgtgtgggattattttatagttggtgtggaatagtgcccgccctcagcttcccctcagcatcacgatctgacaagattcctggcttctgttactctgttgcagaaagcagtggattagtgtatatttgtgcacgtacacatttatgtgcataaatgttggtatcttgtttgctaaagtagctcagtttcagacttttatagataacttttgtaaaataggagccttggtgtgggagaccaaactcttgttgagccctgtcactgacacaaaaggaagtcacccagacagatgaaaagaaatggaaggtttgattgtccattatcaaagagtgagtacatagttcaagcccttctccccagggcacacagtcaattaacagcaggaaattacaccattttaggttaatattctaggagatctagaaggcaacccttctctattggtattatcatagtaacaaaatggagagcaaaacagcatgtgatcatttcagtagattaataagagtattttaggaagctaatgatgaaagtgtcagcaaatgaagagcctgccttcaccccactagggaactttatgaagtagatacagcgggcgtttagtgaaggagtgcagacgcttctgctgaggccctcatgagaacacctcttctagatttgtgtctgaggtcctaggcagtgcaacaaggtatcagcactgggaaatatacaactgggcaacatggtcacaagcacaaaatcatgaggaatcctcagagctgctattaacaagatatggtgataagaaaagatggcaaagacagccccacaaacaaaccaactgtgcatatataccgccagtgggattgaaatatttcagtatctcaaagtatgaagaatttaagagtaaagttaccagaacatggaaacttacatattaaaactaaccagctgcagtgggtgctcaaccaggtcatgactgtgcaggcaggcagagcatggagattacaggaagttttcaaagaaggggagtgtggagaatttattcttagacctcatggcaagaccctgtctcaaataaaatacaaatggagttggtgtggtggcttaggcccaacagagttagaggcaggcagatctcttgagtttgaggccagcctggtctatgtaatgaattcaaaactagccaggactacacattgagatcctgtttccaagagggtggaggtaagaacaaaatgagatagtgttctatgagggctgacctggaattcagactgacctcaatcctttgacactcctacctctagtgtttagattacaggccagggctaccgtgtggctaacaagtatgttctcaaaggggagttgagggttcctttattgtagggtccttaatgggtggcatacacaaagatgagcatggccagtttttctaaggctcacatggatgtgatgctggtccacatttgaggtaagcaacaaatcctggagtttgtccccagctgggtctggctgtgtgtgcctctaatcccagcaattgggaaatgggggacatgacagctaaaggtagccctgactgtgtaggaagaatctttaagaaagcaaacaaggggctggagagatggctcagcagttaagggcactgactgctcttccaaaggacctgggtttaatttccagtacccacatggtgacttaaaactgtaattccccttctagggaacccaacatcctcacacagatattcatgcaggcaaaacaccaatggacataaactaaattaaaaatgtttttaaagcaaacgaaaacacaaggaatctactctgaagttttgtggcacaagtgagtgcatacggatacataacacactgcttcacggaggctggggagagagagacttccttgtcttcaccaatagtgaatccatcagttcttgttcatctctcgggactctgtgatcagttatgaagtgttaattatttttaactttttaatattttaacgtaattgtgtgagtgtgtgtgtctcagaggtctggtgtcattcctcaggtgctgtccaccttgtttttaaaaatatcttttgtcttgggactcccaggttaagtcatgctgtctgaccagcaagccccatcatacctacctttttttaaaaaaaatattttttattgtgtgtgtgaggggctacaccaccaatgtggaggtcagacataacccaagagtggttatgtgagtcccagggaatgatcacaggtccttggacaacagcaagacttttattattttttacttatttatttctttgaggtttcactttttatcctaagctggtctcgaactcacagagatttgcctgcctctgcctcccaagtgctgggattaaaggtttgtaccaccatgcttccctctttatgtgttgttttttagatgttgatcttggatcccattatatagcctttctgattgaacttgtctggggaagagtggggctggcagcgcaaaaccagcactgtccaccagatggagacaaaacacttccgtgaaaagtgctccacacaaaacctgatttcaatgcctattccaatttatgttataccaatcaggtcaaaaatgtagcaataaccgggcatgcatacccataatcccagaatttaggaggttgaggcaggaggattgcaagttttagtctagctggaactacatagcaaaacctgctccaatgttcagctgtcaaaaaactgaccctggctctggagaaatggctcagtggttaagaacactgactgctcttctagaggtcctgagttcagtttccagcaaccatatggtggttcacaaaccatctgtaatgagatctagtgtcttctttttgcaaaacactatatatgtaataaatatttttttaaaaaattgggatcctgtgtgtcacctctcgtcccctccccccttccctcctgaacccagggtcttgctcatgttgtaggctgagctcatgctcccattttacctacatgccttattaaggtaccaatccctttctgaccctttgtccccttgttagataagtggagatggccaaagagatgtaggtgaagccactccaaagcctcaagaacttttgttcccataccgccccctcctgccctctatttaccccatcctcctgaggtgcaggagccatcactgtccctgagatgacaagtgtgaggacaaaggccgccactgaggatggcagagaggctcaggggtcccttcttggtgaccactctgagcagtgactgtctgtggggattatggaggtatgaacttggttttgaggcatgagagccactgttggacaggctacagtttgaggataaaattattacttgatccatcatgatgtatgttgggttgggcttccgtgtagagcatgcatgcagagtggggagtatgttgtggagtgccgatctgggaccagggaagcaagaggcagagccatcaagggtctgagctgtgcatgcctcacagcacaggtccaagagaggggcgtgcctttcagacgcagctgggcctgcatggtacattgcaccccaccccacgcccatcccgggaatccaaaccttctaagttaatggtaggccaaccaggaggtgtccaggactggggaagaatggcccagagggtgggacagacacacacacatgcaaatatacaccacacaaatatacaccacacattatacacaccacacacacacacgcacactcacacacacacacacacacacacacgtgcgcacacaaacatacacgcacacacatatacaaccacctagtatcacccaatcatgaaccacatgaaacttctaaacctggaatgacagatggccttctcactggctctgtgctgctgtttgcccccgagttctggtgtctccagacacatgcgtaggttttcctgaagcccatcacactgtgtagacctctaccagcaagtgtccggtacctctgctcctccggcacctccctgcctcctcctcctatgtgtttacttaattaaaatttgctgccaacctcaggtggcttcttttattctgttttttttttgttttttttttttttgtgcggggagtgggagttgagtttctgacctttggatcttgatttccaattaagtatattgtcaaatattaacattacaactggtgggttagctttaggatagaaatttgtgttgggtaagtgcaagaatatccatttattttgagacagggtctcattgtgcagccctggctgacctggaactctgtatatagaccaggctggccttgaacacacagcaatcttcctgcctttgcctcccaggtgcttgtggtaaacataccccaccatgttggaaagccagcagctaaaacatctgctttaaatttagccatgctgaagcgtttcctctaaaatcaggaacaagacaaggctgtccactctctccatatctcttcaatattgtacttgaagttctggctagagcaataagacaagaaaaggggaccaaaaggatacaaattggaaaggaagaagtcaaactttcactatttgcagatgacatgatagtctacattagtgacctgaaaaactctaccagggaactcctacggctgataaacaccttcagcaaagtggcaggatacaaaattaaataaaaaaaaaatcagtagccctactatatacagatgataaatctaatgagaaagaaataaaggaaacatcacctttcacaatatccacaagcaacataaaatatcttggggtaacactaaccaaaaaagtgaaagacctgtacaataagaactttgagactttaaagaaagaaattaaagataccagaaaatggaaagatctcccatgctcttggataggtagaattaacatagtaaaaatggcaatcctgccaaaagcaatctacagattcaatgcaatccccatcaaaatcccaacacagtttttcacagacattgaaagaacaatactcaactttatatggaaaaataaaaaacccaggatagccaaaacaactctttacaataaaggatcttctggaggcatcaccatccccgacttcaagctctacgatagagccatagttctgaaaacagcttggtattggcacaaaaatagacagaccgatggaatcgaattgaaaaccctgatattgacccacgcacctatgaataccttatttttgacaaaggtgctaaatctatacattggaaaaaagatagcatcttcaacaaatggtgctggtacaattggattcagacatgcagaaaattgcagatagatccatacctgttgtcaccatgcacaaaacttaagtgcaaatggatcaaagatctcagcataaatccagccacactgaatcttatagaagagaaagtgggaattgcccttaaacaaattggcacaggagaccgattcctgaacattacaccagtagcacagacattgaggtctgcaattaataaatgggaccgcctgaaactgagaagcttctacaaggcaaaggaaacagtcagtaggacaaaacgaccacccacagaatgggaaaagatcttcatcaatcccacatctgacacaggactgatttccaaaatatataaggagctcaagaagctagccaccaaaacaccaaacaatgaaattaaaaagtggggtgcagaactaaatagagaattctcaacagaggaatctgaaatggctgaaagacacttaagaaagtgctcaaaatccttggccatcagagaaatgcaactcaaaacaactctgagataccacctcacacctgtcagaatggctaaaatcaaaaataccaatgacaatctatgctggagaggatgtggagaaaaaggaacactcctccattgctggtgggagttcgaacttgtaagaccactctggaaatcagtatggcggttgctcagaaaaatgggaatcagtctacctcaagatccagccattcctctcttgggtatatacccaaatagtgcatgttcatacaacaaggacatatgttcaaccatgttcatagcagcattgtttgtaatagccagaacctggaagcaacctagatgcccctcaactgaagaatggattgagaaaatgtggtacatttatacaatggagtactactcagcagaaaaaagcaatggaatcttgaaattcgcaggcaaatggatggaactagaagaaaccatcctgagtgaggtaacccagtcacaaaaagacaaacatggtatgtactcactcatatatgaattttagacatagagcaaaggattaccagcctataatcctcttcaccaaagaaactaggaaacatgaaggactctaagggataaatggtccccaggaatgggaagtggcatgaactcctgagctaattgggagcatgagggtaggggggagggagctgctacaataagagcaagagaagaagagtagaggagaggaaatggaggagcagaaatattgagttgggggaagaatagaggagagcaggatgagagataccatatcagagggagccactataggtccaagaagagatctggaaccagggagatctccagagacctacaaggatgacacaatctgacaatccaggcaaaggtggagaggataacctaaaagcccttcccctaaaatgagattgatgatttctgtttatgccatcctagagccctcatccagtggctgatggaagcagagacagacatccacagatatacactgagctgaaatcgggaatttagttgaagagagggagaaatgaagagtgaaggggtctgtaccaggttggagaaacccacaggaacagttggcctgaacaaggggagcacattgaccccagatgctgtcggggaggccagtacaagactgatccagacccctgaacatggatgtcaataaggaggcctctgcactccagggagcctctggtggtggattagtatttttccctggtgcaagaagggactttgagagcccatcccacgtgaagggatacactctggccctagacacatggagaagggcccaggaccagtacaggaagatttggtggactttgcagagcccctgttgagggccctaccctgcctggggagtggtgggtggatggggtgaggggtaggttgggtgtgggggaggagggatgggggtgaggggagggagagggagagagagaagggacttacatgtgaaacaagcctgttccctaactagaataaataaaaatttagctgtgctgactttccgccatctttctgcgcagtcaccatggtgctcatgaatattctggccgatgctctgaagagcatcaacaatgctgagaaggaggcaaacgccatgtcctcatcaggccctgctccaaagtcatcctttggttcctaactgtgatgatgaagcacggttacattggtgaatttgaaatcatcgatgaccacagagctgggaaaattgtcgtgaacctcacaggcaggttgaacaagtgtggagtgaccagccctagatttgatgtgcagctcagagacctagaaaaatggcagaacaatctgctcctgtcttgtcagtttggcttcattgtactgacaacctcagctggccatcatggaccatgaagaagcaagatgaaaacaggagggaaaatcctgggattctttttctagagatgtaaaacataaataaaaagcctccatagaccaaaaaaaaaaaattagccatgctgtttagcaaataaaagattcatggccagaaaaagatagtgatatacagtaaagacagattcagatgaagaaaaaacctctaaagggtttacaatatgttttaaaatatggtttgatcaagcaagaccccctgaagcagtagcccaggtgatccacatccaaacagctgggacaatgcagccttgcagactactacagtcagtatttgaccaggtttctgggttttctaaggatcaccatggtattgacagtgcccccaaacagcaggaagaagtttggagagaatgatgcccaaattcccaaatattataactttttcatttaaattgaattggttataaatggttaatgatcacagtcaatctctaaagtaaaaaaagggaatatgatatagaaatgaatatttttcattggtatggattttgatttattgatacaaatttaagatccattttgttatatgtatatttctcttcttgtttaggtattgtacttgtacagctcatttaaaaatgtaataatgtataattaaatacagattactgtcacccataatagtaaaaacttacgtaagttaggttttctagatatacagatatatatctgagatgtatagtcttcaaaccttttaaagacctacagaatatggcatttaaaatggtttagggtttttcatgacaatgagacacaactgctcctggcaacaccaattacatcaaaaaggaggatagacattgaagaaactcgatctggagttgatttcaatatggcgagactagcagtttaaacaagaaactgctcttgcctggactgtttgaatgtatgctgtccaaactggacatacagaacacacaggaaagtgactgctaaattttccaaaacaaaatgagacagtccttcggggttcctgcttcatggaaaagtttgccagacattctgcaggacacagagaaaaatgactaactgccaatgcaggtggacagtttcaaatttcctgcttcactgagaagtctgccacaataggcctgtacactgaagatggattccccaacattacagagaaactttgggtgactgtccaggcagtgagatgtctctgtcaattctagagttaatatattatccttctgaggtctttgatgaagttgaagacagttatggttatggttttccttagttatgataacagataagttacacataaaactgtagactcacaaagacagggtattttctataaattttgccaaatgttaatgaactaaatattgttaactatagttcttacttgatcactgattcgttatataaaattttactatgttaaaattaaaaccctttttatttagacggaaaagaggagatggtatgggatgaccttctggatatctgtttctcttattggttgatgaataaagcactgtttggccaatggaggtgggaaaagaggtggggctagtagatgagaaggcggctggggagaggcagagagagacaccgtgcagccgaggaaagagtaacgggttcagacccttctctgctaagataagagcccaggaagagaggacacgtagagcattctccagtaagccaagaccatgtggaaataattaatagaaatgggttaataattaagaccaagctagccaataagaagccctagccattggccaacagtttagtaattaatatagcatctgtgtgtttatttggggctgaaggacaacaggacctgccagggcaagaaactccagcaacaggttctctttccactgtgtagattccagggacagaagcatagtttgatgtatcccattgattagtgagtgaatttctttttaagcagaactattcaaaataaataaaatttaaaaacaaaaacaaaccctaggctgttcccttattctaccttattatacctgtcacagcctgtgacttcttctgggtaggaaccagatcaagtctcacagaccatttctgtgagcaaatgcacagacagcagacagagacaaacagccgagagcagtgtattgtggtctgtatgtgtgttgtgatacactacatgtgtgtagtgacgaaggtgtcacccccagcagtgtcctcccagacactaactagaaaactgagaatcctcaggccactgcttccaatccctttcccatctcccctacttggtatcctaagggtgtttcaacttcccccctctctcctcctggctgtcagcatcttccgatcgagcccagcattactctttgatgccaacatcggcacacctcccctgactctccatgctgccaccagacattatctaaaacctccagctagctgaccccgtggctcctccaacccccattgtctcatctagctgaagctttcctggaatccaccacatgactgagactagccttgaactactgatcctcctgcatctacctctcacatgctgtgataccatgcctaactcacaaatagggcgggttttttttttttttttttgcctatagattgtgtaggagtttctcgttttacgttaatgagtcaaccctaattaacaccttttaaagatgtattacatgtgtatgagcgtttgcctgccgtatatatgtgcaccacatgcatggtggcagatctctgggactggattacagatggtcctgagacaccatgtagatgctggaaaccaaacccaggtcccccgttaggagctgtaagtgctcctaaccgttgagccatctctccattcccaatcccatttttttaactaatgaatcacatttggagaggacagttttaggtttgcagcaaaactgagcagaaaggagaactccaaatttctccactcccctccattggaaaggagagaagccccgttgtatcagtgtggtccctctattattcacttggtgcttggtcttgagcacagggactcgtgtggtaagcacttgctctcccactgagctacgttccccagctcacctccagtactggcattttcctcctcccatgcctagtatcccagctcccactttcccatcacagatctattaccctcctccctccctgcttttctcctctcatgggcccttttccaagttgcactcacactcacttccatataaatacacaaacacacaaattagaagtcaggacacacacatgagccaggcagtgagtggtggcgcacaccttcagtctcagcacttgggaggcagcggcaggcagatctccaggtctacagaggagttccagaacagtcagggccatgtagaaaccctgtctctaaaaaaaaacaaaataaaaaggatacacatatgaatgaaacatgcagtatttgtctgtcagtgggtaaaaacgcttggctgacaagcctgacaacaaagtttgatccccatgagcctgatgtccaagacccacatggtggaaggagagaactgactcccaaaagttgtcctctgacctccacatgtgcacctcccaaaacgagtaaattaatattttctagctccatctatttccctgcaaattttatagcttaatttttctttataattaagtaaaaatcccttgtgcatacctaccaaatttttcttatacactaatctgtttagtttttttgaaaaaccttcatgtggtaatattttgtttggtttgtgctctaacaaataaagattgcctggagatcagagtgtggagctagctactagttaaccatagaggccaaacagggattacacctttaatcccaatacttgggatctcatgcctttgatcccagcagtagggaggagggaacaggaagtaatgtggctgggtggagagaggaatataaggcaggtgagacagaaactcacccccttttcaggctgaggagttggctagttaagaagtgactgtagcttgctccttggtctctctgatctttcagcatttacccctatatctgactctgggtttttattattaagaccaattagaattccagttatacctccattgattttcatagtgctgtgaaatcccttttttgaggtagggtctcatgcagggtagctgacctagagctcactttatagccaaggatgaccttgaacttctgaccttcccggtggagtttctggtacttgctatcttgtctgatttatgtagagctggggattgaatccgtggcttcatgcatgctaggcaagcactctaccaacacagccacattcccagcctatttttaaagatctaattccagacaaaaggtaggatccttacatcctaatcaactctgcaatcgtgtgaggattggggattaacacaaacaccccaaagtcagagctcaccaacaatgccagctcacagaataagtctattccaacttctgacaagtgggactatttcttcctcgcttatctgttagactttacccataaaactacttggacttgatgccttcctttttggaaggctattggttgtgtgattttcaaaataatcatgtgactacccattgatttctctttcagtgacgtttggtagatgctatctttcaaggaactggttgctccctccattctctccttttgctcttcctttgtctgtgataggatcctactctatagcctaggctggcctagaactcatgtgtcccaggctgactctaagctcactctaatccttcctcactctctcgagataactgatgtgaggtaccactcctggccaaagcccatttcctctacactgaggttgaaagtgcagaactgtttgtgatactcctcgtatatttatcagggcctggtgacctgagtttgatcctcagaaccacatgatagaaggaaagaactgattcctacatgttgccctctgacctgcatgtgcaaccatggtacacatgtaccacacacagacatagacacacacagacaacgccatgcatgctaaggaaaacatcctgtggttaggactgatggactctcttccgtttctggtaacagaagcttgcatcttttctcattttcttggttaaccaggagagagggttgctctatcttttcagaggacccaaatttctccatcactttcccgttttcagtgtcactgcattttactctgtgtgtgtgtgtgtgtgtgtgtgtgtgtgtgtgtgtgtgtgtgtgtgtgtgtgttttcttttgcttgctttgggcttatattctggttggttggttttgttgttctttgtagaaaggatttatgtagcctgggctgctgtctaacatgctatgcagatgagttatgaattttgtctcccaagtgctgagataaactgtgccagcatgtccagtttgtctcatagtggggatgaaacccctggtggctctgtgcatacttagcaaggattacatcagcagcagtctctcctgtacccctccacccgccccctccatactctcctacctcctttccttcccaagaacatgctaggactgcaggccctggtaccgtcgttttcttacatgtgctattcagcatggcagatcttttccacccccccgttttgttttataataaacaatattttcattcagtttaaaatattaaaaggtttcttttgagacttctttgatcaatgtgctatttagtaattaatatattgggctttttattcttgttttttgttttttgttttgtgtgtgtgtgtgtgtttgcaattttgagatggtgaacctaggatggactcaaaaacatcctcttgcctctgcttgcaagtagctgggtctagaggcttagaagtgtagtgtgcaactgtcaactatttggaggattcccagttaggtttgtgttattcctggtttcatttcactgcagtctgagagtgtgtttgttggctttcagatagagtctttctaatagcccaagctggcttccagctcaccatcctggtgtttctgcctcttgagtgctgggatgagaggcatatgccaccatgccagcagctgaggcctattttgtagaacttttctttttaagcttgttaaagggtgtttttccatctagagtgtgacttcagtgaaggttttgcctgagtttgagaataatgttccccctcgtttgtcagatgggtgctctgcaaatgtcaacagttggagatgactgaggctgctgactgggctgctcttggcctcctgcattttctgtttgatcgtcaatcgctgttaggcaggggctagagtatgcaactctaatggactcatcctttttgtgtttctgttaaatggatttctgttctctcagatattttgactctctgctgttcagcttgatcgtattaatgactgttaggtctttttggagaatagactacagttgttttgctcctcttggcccctgattgttttcgttgcaccagtgggctctgcagcaggaaactgggatcttgctccatttaagccctcaagtctcccattctctgggaggcagatggctatcttcggccgaggatgccggacatgaggttctgggtccacagaacagcagccagggactagccacgaagggtcgtgtatccaatctgaaataatgtcttccatcacttttgctcttcttcacagtttagtcatgaacctcgcaaaaccgtcgtttgctgttccattaaagtcttcatactcggcaacagcacttgcaccttggctgtagcatctaatatcttttttctattttcaatagactttgtctttgcacaaacatttcctctgatctaacatctcctgcagctccggcaaactctgggtcgacccagagtacccctggagctagagctgacttcagagaaccccggggcagccacgaagccgggatcctcgcgccccaaccaccacggttaaggattctgattcgttaccaaaccgccacccagacaggaactgcaatttgaacttctcccagaaatcagaacaaggtaaagtggcctaaaagccacacccaaattaccggtttacaatccaggatgccaagtcgacatcggtcaggggggagctggctcctcccacctagacactctctgattcccttattttcaggacggcctcgctgcctgcaggggtgactgagaccctaagtccagagctttgctgagtcgccacttcggagaataaacctccaacggtcggccaggagcagtgtgaaacacacctgcagtaagtccttgttcttcccctgacatgttcaccccgggactcgtgtgtatgcctgcatgtgtgtgggggccagaggtcatccttgagcgttgtttcttgggagttatctatcttgttgaggcagtctcccataggggcctggaaatcaccaataaggatagacagacaggccaccaaactctggggattgtcctgcctctgcctctccagcactggcggttacaagcgtgtgttaccaggcctgactttttatgtacattctgggcgtcaaactcaagtcctcaatttgctgactgaactctttcctgctgttcagagcttttaagaactcagcaagtgaacaagatgcccttacatcttgcttagtcgttctgtctctatctttcaagttcataaataattgcatgagtaagtgtgtatgtgtgtatgagtgtgtatgagagtatgtatgtgtgtatgaatgtgtatgtatgtgagtatgtgtttatgagtgtgtgtatgagtgtgagtgtgtgtgtgtgtgtgtgtgtgtgtgtgtgtgtgtgtgtgtgtgtgtatagctcaagattcccttgagctatagttacaggcagttatgagcttctcaatgtgggtgctaggagtcaaactctggtccagaaaagcaacaaacttccttaagcctgagccatgtcactgcccttctctgcagtgtcttgccccgggctccaccatggtaggattacaggatgaggcaccaaggctgctcactgctttgggtttccgcatgttttctggaaagtcaatgcacatcaggttcttgcttccaatactgcactgccatttcttcttgcagggcctattgattttgagcttgacctttaaaattaatctccgtactgttgttagtgagacttagctggggagtggaggtacatggccacattcgtttttctgatgacacagggaaacatctcaaagctcttaggcacatctgattcactgtttaatctgctgtcctggtgcccttaagccaatgctgagttttgtcacttgtgaactgaaggtaagagggcgtcagcactgggctcccacattcaggtggcccttcattttacgatgttactatgtctatcacaaatccaacctctctcacacactttataaatcgcaaagcacagtgtctttcacacagtggcattaaatctgtgtcaaatacagtgagatcttaactctctcttatattttcgttaaatacatttgtgttttacacacattagggaaaaccaaaccttaaaagctaagaaagaaagcatgaagaatatataattcattggcgcactcacaaatgaaggcttatgaaaatgaatctacatatagccttttctactcttttttgtttgtttttttagagaaaggaaagtttgtttttatttgcttgtatttcccttcattttttttctttttcttttttaaatttatttattagttctagttagggaacaagcttatttcacatgtaagtcccttctccctctccctctcctcactctcatccctcctcccccacccccagccccccccaccccatccacccaccactccccaggcagggtaggtccctcaacgggggctctgcaaagtccaccaagtcttcctgtgctggtcctgggcccttccttttctactcttgtttcacatatctttctcatataacttacatttccagcccaaacaagcacagtcaataaaagttaaggccggtgtccagccccagtatcctgttgcatttatttgttcacgtgaacatgtgcacatatatgtgaaggtcagaggtccatatatggtatcttctgtaactgctttccaccttacctttgaagattggaccatctcactggagcaatctggctagtctgggatcctcctgcctcagcgttcacagacacacttggcttctttcttggttgtcagggatccaaactcaggccctcatgccactgaaacaagcgttttactggctgagccatccccagctctcctcattcccagccttggattttgtttgtttctgagacaaggtcttgctatgtagcccaggctggcctatgactccttagtaagaacatagccataaagacagcccttcatgtcatgtctcttgcctctgtaagtgccagctttagtctcttttttttttcaattaatttttttaaattttttgttttattttcttttgtttttttgagacagggtttctctgctagaccaagaaggttatctgagtgtgctgttatgatctgagtgttcttctcctcttcatacccctcccatacctacctcctcatacctcaaacattgactcataaaaattatagccagtgcacacctataattccagcacttgagaagtaaagggaggagggacaggaattcaaaactagcttcagctacatagtgagcttcggcccagactgggttacataagacccttgtctcaaaaaataaattatttggctgggtcacaccggttaatcccagcactcggaggcagaggccagtagatttccaagaacttgaaaccagcgtgatctgcacagttagttctgggacagccaggggtatatatatactacaagaccctgtttcaaaaaaaaaaaaaacaaaaaacaaaaaacaaaaaaaaaaaaacagcacaagaaaatattattagttgacaataatatttaaccaaaactccaaatgaatgttatttaaggtaattctttcaggaaggtagatctttttttcctggaaagtctaatagtgttaatgagagctacagaagtaaatatctgatagtttataatcataagtcattcactgatcccaatttcttttctttttctttctttctttctttctttctttttttttttcttttggtttttcaagacagggtttctctgtggctttggagatttcctgaaactagctcttgtagaccaggttggttttgaactcacagagatccacctgcctctgcctcccaagtgctgggattaaaggcatgaaccaccatcacatggcttctgatcccaatttcaaagggggaaatccatgtgtttgctggcctcccaaatattatgcatttggtccctaaaaaaatctgcatgcaggaggcttgacagtatcaggaagagaaggcaaagaatacagagatatggggggtgggggagcggggggggggggcaagacattcccaggacttgctggtgcatggctaatggaaaagtaaatgggcagcaagtgcttccaaccctggctgtccttgaattcaaaaagctgagcaaccctggcccaagagaggctgcacatactgtctccactccccaaagagcacatgagaagaaaggtggcatcggccttcagctgctcagagcacccagaagggccctccagcagaccttcctgcttcttgcccacctcggtccctgccaggcaactggtactgcagctcctggcaagacccaaacccccatcttgctgtttgctcctgtcttgctctctcctgatggttttctgattttacagcatctcctctctttcccacagaggccgatggaaacctgagcccagcaggggagggaaggctccaacgtggcagggtgcatggccaggagatgttcactcctccaggccatggagattcagactgaaagattccagagacccataggttagaccgcttggcgctttcaatgcaggggctctcagcaccagccagctgcaggcgccaaaacaaagaacctcgctggacactggagctcggtgtcctctctacccaagctacaaggggcacctgacttctccaagcaagccaatcttcacttcgtgttggtcttcaaagtcattaagatttctcttggaaaccttgaagcaacgatttcttcctatgcagttgaacctgaactgcctaaagaagataagattgggcccctggtggtcttggccggttcttagagataaggctggagccgggtccttgggcagatccactagccagcacaggtgtgtgctgcccgatggggatggatttccttttggacatatcttgaagctagtttgtctggagctctgacacttgggctaccatatgggtggagggagagaccacagggatggctggctgtagctgtgccgggcagggagaccccacagctatgctccgtggagcaatccaggccctgctaacctgaatggatgtttcatcaagcctggctgtcccacaagaaggggattcctgttataacatgttcataggggagatggtgggagacgatgaaggggagggatgtcttctttctgtcaggctggcttggagctggtgagcacagcgttgcactgtggtcctccattccatctccttgtcctcgggacctgtgctgctcccccgaggattctaagaggaacgatgaaagatggatggcaggctgctggaaccacaccccttgaggttagccggcagctgaagttgtacctggctggcttgggggaggtgtgctgttgttggtcatatcacccgagggccacgtcttcaggtgccaaggtagctgtggagctcagagttaaaaagagcacaggagaagacataggaggccattgtcttgttgaatttccagcccattaagaagtcctgtccataaccttgaagacaggacgagccccccacatactgcttaagttcctcatcttggtggctcacatttatcaatgggtccatcacagtgttctcctccctggggctgagaatgaatgagttggtctttgaatgtattcttctcaccgtagccacataggatgaatatctcctgttctgcacctctctggcagttccctgaacctctgtaggtcacaaggcaggagcacacctaccagagcatggaggtccccggctcagtgcagctgctttaggagaatgccaaactgccccagaaagcacccagcttgttgtaaaaagacagattggctgctgaagccacagtttgcaatcttgatgttcatgccagcatcagggggtttgtctccctttaagtctgtaaggacaatgcacttctggtggcagcatgcgcacgagacactattttgttggaatttgcttcaggcctctgttttctctcccactgctatgaggcaccaggtatccaaatacttccattccgctagcaggtttcataactaggctgtttttccaatgtctgtcacttcagatattccactctgttgggattattggagtcttcatgcatccttacttcaccgggtgttctcggaacggtgaggtgttcctggcctggaggatagatgtactcacagtgttgactttacctcagtcgggttgtcttcgctgaggatcttcagaagcatagctgcccatgtggtctctcttcagcagatatgacccatgggctctgcagcttgtcagacttcctgctgggcctcagggccaaggcaccctagagccagcttagatttgagaaaagtatgcacctgtttcaagtcacccctggaaaaaaccttaagttttttcctgatgatttatctttagagtggaaataaagcacagtgctggatgaaaagtaaagaatagttttcaaaggaaaaagtgattaaaagaaaaattaaaaagaagaaaactagaaagagctaagtggaccaataaactagtcccagccagggattcacaggtacttgggattataaaatgatggcttctttcaaggtcacaggaaaagtgacaccgatcagtagtagagttctcaaatagccatttttctctcaagaaaagtatctatagtctgaaagagcttctgtatttatgtgggttctgattacctatgtttatcttattagacgtgacaacctgtaggactcgtcaatgtcctcattccaagcttgcagcggtgtcagggtgcttggcttttcctgaacttcagagcagctgcacttaaaaggatgggtttcaaagtgatgccacaacttaactagtgttgcaacaaagtgacacagtagcaatcccagttttctttggagtagattccttcccgagagctttagaaccccctgggttagtctcagcatcttgaaatgaagctaggtacaaaggagtaggcctgttgccccagctactcagacgctgaagcaggaggatctcttgggccccagagctctcgactggtctctgcaacatggtaagaccctgtgtctaacagtcagtagaagcagcatccgtgaatagaaatagtctttcttcgactccacagtgtgttttgttccaagtgtctctcactcagctcagtgtggaacagagcatccaagcactggtcccatccccagggatcccttggttaccttcacagacattttttatcgtagtataatactgatacagggaagtgccaactgtcagtacagagtttggtgactactcctaaattggactcacctatttaactagcatctgggtcaagtgtgacactacaatatggtgttccaagatctctttttccagtcactctctctgcagtgggttctctcttcccacagcattggttaggttagcccgctttcatcagtaggcacataggctcacaaattgaatcttgtgtgctcatttgttcagtatttggtgaggtctacatattgtttattattctaaacaccaattgtgtgaccataagtctgtttgttggccacttgaatcattctcagtttgtaaatgttaaacatagctctaaacattcttatgcaaatttgggggggcaaacctgtcctgctgaatatgcaaatttaggaagaggtatgaggtatgaggtatggacactttagtctcagtacaaatgaaagtggtttgtgctaagtggcacaaccatctgcgtcctggggcctctgtgatggtttttaaagctctgatggtgtttaaagccttcacctttctgcagtgccgcagcagcgcttagccttgtggcttgcatttctctgttgcctagtgttcatgaagaacagcttttcaggggcctgttggccatcccctcttttgagaagcaccagttcatacctggcactcatttctcagccaagtggctttcatttttcatgttgacttctacttcatcctttgtatatgttatatcatgatcaggagacacaaggctacctcccggcttcttcagacgagccaaggagtgtttagtatgctttagccacattctactcaggtggaatgagaattctttacagtccaggcaggccttgagtttgcacgtcccctatctcagcctcccaagcagcggaggccaccattcctgtgagacaaaagccaggttgttgacttacaccccagaaacgagcttcaggataagctaatatgaacccaagctgaagcgttttaatatagatgtcagtatggacagtaagagagagagggaagaagaaacatagaagaaaaggacagtagaacatgccctggagtgggttcggacttttaaaaagtcatgtgtaactagtgtgtgtgtgtgtgtgtgtgtgtgtgtgtgtgtgtgtcaccttggtggcctaagtttcattggccaaagagttttaaagattaggtgggaatgtgttcatatactttcatctaagccagtggttcttgtgtgggtcacaatccctctggcaaaccaatatctcccccaaaatgttcacattgcaattcttaacagtagcaaaattatagttataaagtcctggcaagaatcattttctggctgggggtcatcaccacatgaggaactgtattaaagggtctcagcattaggaaggttgaaaaccactgataaagagttttcttttagaaattaggtttacaatgagctttgttttttttttgtttttttttttgttttgttttgtttttttctgggaaaattacttcacagtgcactatgcaggtttacaggctgatcaaccacaggtcaagttgggcatggcagcactcatacctgtagtctcaggcagaggcagggggatgcggagttcaaggtcatcctcagctgcgtatcaagtgagagctacccttgtctacatgaagctctgtgccaacaaaagcatccaaagaacccttactatacatagtacacataggtgacaaggaagtagggtgctgttggactggggtcgtggtcccactcttgtttgtgagagtcccagcaaacgggggtgagggactccgtttcttccctgtgtcccccaccttaccctgaatctgttggctgtgaattctttgttggatatggccctgcatgcatttcctctcttctctgcagtctgctgttaatctgctgctgcctgctagttcccacaaatcatcccttcccatatagtggacttcttgccacttgaagatgacaggcactttcccatcttgaattctatactggctcctgttactggcggggacagaccttctcagatatccacatagttctcccccctatctcacaggtcttagctcccagatcatatgtcctcaaggagctcctggcatatcttatctaccatccctgtccatcagttcttttatcttttggagacaggatcttactctgtaactaaggctggtctcaaacttgcgtcaccctccttcgacttcttgagtcctagaatcctaggcaggagccaccatgcccagctctatcactttattttgagacagggtctcatgtagcacatgctagccctgatgtcctgacccttctgccccaataaattgtaggtgtgtgtgtcaacatgcctcactcccatcgttttttttctaaaaaaaaaaaaaaaaaaaaaaaaaatgtaacttgtaccaagacatattcaactttgcatggttattttaagaattagaatatgtgtatgttttactccctccctacactctcagtccagccactattttaactgtctttataaggcatcagcagataagaggtatgtagtaaagaatttggaccttggattttccttcctttttttgatagtggtgggtcttctgcgtctcctccttttccttctcttctgcccctctcatatagccgaggacagctttaaaaactcactttaaaaactgttcttaaatccccaatcttcctgcctctgcctctctcaaatgctgggattataggcacgttctacctcatccagccttcatggctttgttctttatttcctcagccctggcgtttatgctgatagtgatttattgtaggcttgtaagcctggtgacatcaaccatctttcaaggggtggggttggggctgaagaatgacatgggctcagcctatcattcaaagactaagtcttgaaactccaacaggaaactctgaaagggctgggcattggtggttcacgcctttaatcccagcactcgggaggcagaggcaggtggatctctgtgggtttgaggtcagcctggtctacagagagagttccagaacaacccccaaagatacagagaaaccctgtctcagagagagagagagagcacagtggtgaagtgcttgctgtgcaagcatgaggacctgagtttgaatctgtccctactctaaaaaagaaactgaaaggtgatgctcagttgacattctctggttgacaattgctccaagcacactgttgtcatctgtattgggaagacatgttgctctgaggacagtaaaagctttacacagtaaaagcctggacccttgcacagtctcattgctcttgctttggctaattttgatctgtacactcggcttgaaataaaacattattgcacgtaacagctttcaaagagccctgtgattgcttttagtgagttatggcctccgaaggtgtttttagaaacccctttatatttgtaatttggtcagaagtgaggtagtccagaactggagaggtagctcagtggcagaaaaataaataaaacttgtttaaaaagacaaaaaatatgagctagaatggaaatcagtgaagataaaacccttaatgtagcactctaagaagctgggtgaattgataggagaccctagcaaagactctaaaacaatttaccttttcacccagtttggaagacattgggaaatgtaagatcaggatggtggctgggtggtggtgccacacgcctttaatcccagcactcgggaggcagaggcaggtgatctctaagaccagcctggtctacaagagcaagtgccaggacaggctccaaagccacagagaaaccctgtctcaaaaaacaaaaacaaaaaacaaaaaacaaaaaaaagataaggatgggatattggttacttttctattgctgtgataaaacaccattactagggcaacttgtagaaagaagggcttatttgggcttgtggttccagaggggtaaagaagccagcaccattggcataggggaagcatggcagtaggcaggtgtggtggctggaacagcccctgaaagcagagattgaatctgaaacagcgggaatttttaaactctcaaagttggcctccagtgacacacttcctccagcaatgccacaccacctaagccttcctaacagcaccctcagttggagaccatcactgatcactgtcaccagaggtgacaggcctttgcctcctccagatgaagaatggtaactgctggccatggtggcatgcacctgtaatccagcactcggcagaccgaaacaggaggattgccacaagctccagtcctgcctgggctacataggaagagactgtcatataaaaccaaatgaaacaaaacaggactgtcagggtggctcatctgggttaaggcactgctgccaaatctgatggtctcagacccacacaacaggagaaaactctcacaagttttctgactttcacacacagatgcacacacacacacacacaaacacataaacattaatataaaagaatgtggtacacagctttaatcccagcactcgggaggcagaggcaggcagatctcggtgagttccagaacatgtaggactgtttcatagagaaaccctgtctcaaaaaaaaaaaaaaaaaaccttgccagtgaaacccacagaaacagctgacttgaacaagggggagctcttggcccccagattgatcactgggaaaccagcatggaactgatccagaccccatgaatgtgggtgtcattgaggagacctcggaaatctatggggcctcttgtagtagatcagtacttatccctaatgtagtaatggactttgggatcccattccatgcagagggatacccccttagcctagatacatggagggagggcctaggccctatccaaaggatacgacagactctgatgatcccccccccccatggaagacctccctggggagcagaaatggtattggataggtagggtgttagtggggtcaggggaggaggggagggagaaggaacagggattgacatgtaaatcaatcttgtttctaatttaaattaaaaaatttaaaagaaaaaagaatggaaagaggacctgcatcttttggcctgaaatattcatactggtagaatggccccaaatgcatttctgggattccttgctatataactttcccagcactgtgcttctgcattcaaagccctaagaagagatgcacttagcctgggagaatatagatatatagggttgatagacaaaggcaaaattttgaatgaaaagtagtggtttgaagaagattgacaggagtgatggtgtctacttcccggtactagttgtaactatctgactgggaaccgcttcccctacctgatgtcatgcatcagaaggcataggaatctacacctatattgactggagatgcctatgaggtacaagatgataacaaatgctgttctgaggctgggcagtagtggcgcacgcctttaatctcagcacttgggaagcagaggcaggtgaatctgagttcaaggccagcctggtctgcagggtgggttccaggatagtcttggctacacagagaaaccctgtctctcacaacaaacaaaatccacacacacacacacacacacacaaaccccacgaacaatcaaaaaactgttctgtcttcagataggacagaggatgctctgggacagatttcttaagaatgtgcccacagctggcaagtcaggctgacgccagcagcctctggatgctacagatggtttctgacatgaatggacacattgagctagccttttgtgtgctaagttgtagctataaatgcaccaactattgtagagggaccagaacagaaactatggcatcatatgaccactgagtcattttagacttaggtgttatcaggagccatggtgagtagctggtaatgctagcagtaaaagaactcaccaagacagaaaaagggcagaaaggggacttattagatacatggaaattcagctgcggtggcacaatggtgttgagaaactgtcaatgtagaggcatttgaaggggctgctgttacacggtggattttctatgcaagtcattaagcagggttctgacgtcatggtacccaggaatacatgctgttggagcttattgttaaccacaacatgattgtgaggcaggagatgatggccactcctgttagacccctggaaaacttaggcctccagggtctcagcccaggaccgaggtcatcccaatcaccaggcagattggtgtgcctccaggcttggagggcttgccctgtgttgattggccaactggttgttatggccagggtggttgctatgttctgcgcgtcattgctgtgcacttatccataaagcacacccagagccgtaaagcatagcgccaccagctaacttctgattggttcctttccacgaggcaggcgtctgacctcttagtgactaagacaaggtcagacaaacacgtgttcagctgttacggctgccgaaatgggagctggtcccttcactccctacattagaaatgactgagcccagccacccaagtaaaactggaatctacacaaggaacacacttcatggcacttactgtccaggaccaggcagagccatagagtactcatttacagagaattggaatgagagacaaagaagggccccacactcaacgtgaggataggagggctttgccagaaagtcacaattgctgcctcagtggaaggatgctgatatggctaaataattcctgtggcaagccaatggtagagtgaccataacattacctcaacttctttttttcctctcccaggatcagggcttcaactgatggtgctggcaggagggatgaataccttcttagggctcctgttgctatgaagagtcactatgaccacggcaactcttacaaggaaaacactgaattggggtggcggcttacagtttctgaggttcagtccattatcaacatggagaggagcatggcagcgtgtagtgtaagcagacatggtgctggctacatctttatgaaggcaacagagagagagaggcctgggacactaggagtagtttgagcatagagctcaaagtccaccccaagagtgacacacttccttcaacaaggccacacccactccaacaaggcctcacctcttaatagtgccattccttttaggggccattttctttcaacccaccaccttttccaagcacaaaagtaacagtagctttgttttgtttcacttgaagcagggtctcatgatgtagaccaggctgacttcaaactcctggagatcaacctgcctaggccttccaggtgctaagtttaagggtgtgtgccacgatgtcttgctgtcacggccatctcttcatctggaaatcaaggctatgggaggaaagagctctgtgttccaacactataaatgtgcctggggtaggtaggctcgtgattctttcctgtctaggaacgcttagtgcccactcttagtataccggctgtgagagctacagcaaaaagcaagaccaaggaacaccgtgatgacccacattctcattctgcgaatattgtgatacattatgaatgagaccttctgaagtatagcttgagcatgtagttaaataattcattcttagactggagacattttgaatgatgacccctaatggaataatattatgaattgcaaattggaacatgaaattaaatgtgagatttcattcttttctgtcacatttagcatttttgggggaaaaaaataaatgagtttctatggaatgcagagctcctgaacccctcaggtggctctctctctctctctctctctctctctctctctctctctctctctctgtgtgtgtgtgtgtgtgtgtgtgtgtgtgtgtgtgtgtgataagtcaattttttagagagtccaggagaaaaagaattgtgttgtgggatttttctcacctactcagacctgaccttctgtagatattttagtctattgagtttgtggtaacaaaaatatcacagaatttgtggattgactgacaaacccttactttcagttctggaagtgaaggggttcaagagatgcagagatccagcatttgatgagggacccacttcctctttgcagctgtcttctgttcatgtgtccttgtcagacagcacagccagcatctccatcaagggcacccatcccattgagagttagggtttccacttaagaatttggaagccgggcaatgatggctcacacctttaattccagcacttgggaggctgaggcaggcagatctgtgagtttgaggccaacctggtctctgtggtgagttccagtacagtcagggctatgtagaaagatcctgtatcaacaacaacaagaatttgggagatgtgaaggatcgtggtgacccggcactggttcctgaagctccattacgtccctaaatcatgcttctctatctccaattctgtacacaatggtctacactatggcttcatttctctgcacaggtctgtgataagttgtttctttttctcctctctctctctctctcttttaagaagggtctcatgtagcctaggttggtctcagatttgctgtatacccaaggatgtagtttaaggtcaaactcctgatctttcagccaccacttcccaagtgctagggttacttgtatctgttgtcataagtctttgatattctcatttgcccagtttttacacgaggttaggatgatttccaaactcattatacgtgggaccagaattctttatttcattttcattaattttatttcgagtgtgtgtgtgtgtgtgtgtgtgtgtgtgtgtgcgtgcgtgtttgcatgtacgtctgtgaatgtatgcacttgtgtatgcacaggtgctcttgtaggtcagcaagaggaaacaggttccttggagctgaagctacagggtatttgtgagctgctaccatgggtgctggaattccatctccagtcctcacgagtgagcagcaaacactcttaaccactgagctgactcttccttcagcctcctccacttgggttttttgtttgtttttgtttttgtttttttcttttctgagaacagggtttctttgtatagctttggaatctgtcctggaactctttttttgtttgttttttttttgagacagggttttcctgtgtggccctggctgtcctggaacttgctctgtagaccaggctggcctcgaactcacggatccgcctgcctctgccccccaagtgctgggattaaaggcctgcgccatcaccgcctggttctccactcagttcttaaattctgattcatttagagtatcaaaaacaaccagttagggggctggagagatggctcagaggttaagagcaccagttgttcttccagaggtcctgagttcaattcccagcaaccacatggtggctcgcaaccatccgtaatgagatctggtgccctcttagggtgtggagatatacatggaaacagaataatgttgtatacataataaaatcttaaaacaaaaacaaaaacaaaaaaacaaccagttaaaggctctgaagatgaaccaaagataaatcacaaagtaagtggtgtttattcaaagggaagagctgacggtttgagtgagaagagcagatgtctactttattcagcctgacagtgtgtcatccttctactggggcacgatgcaaaagccagcttagtggcaagagggagcatgtgatttggaatggagagtgggaagtctggggttgttagcagcctgtgaaagcagcaagctaaataggaaacaaaggtagaaacgcacagctgtgctgtccccaggctgtagctccagtgagaaggggactatttagctagagacgaaacaggaaagcagaggcagcgctagaataagacgtctagatcatctttgcatgtgtttctgggtgaataggaagtgaaatgctggtgcaggaggctggggctggctcaggagaaggtaaaagccaaggctgactctgaagcttcctgaactttatgtgagaaccatgcctaccctatccagccagcagtgggtgaagtcatgtttgaacacaagccctgcccaaatcaatggtaaaccactaggctaagaagacacaattgtgtcccttaggaagtcaggttaagctttaaaataagtcaggcatggtactgcacacttgtaatcccagcactcaatagactgaggtaggaggattgttgccagttccaggcctgcctaggttacattgcaagactctctcaaatcatatctcccagctgtgctggtcttgggaggttctgggctatgtgggatgtgcaaagctaattgaaggtgagaccctaggacagaggcctgtgtaggttgtcacccatgatgtggtggattttttttttttgtgtgggatgcagatatttttgagttactcatgttctataagtagccccagtacccttacagggagatggcaggccaaaacagatactttcagctagctagcctggtgtatgcaacagcagcactagcaacaccagagagactctgcctcaaacaaggtggaaggtgaggactgacacattcccacccctgctgatctctgacctccacaccacagaaccctgtatcatgctcacacctgagcacacacacaaacgtttgaaatgcaaccaggtggtggtggcacacacctttaatcccagcactctggaggcagagccagatggatctctgtgagttcgaagtcagcctgttctacagagcgagttccaggacagccaggactacacagagaaaccctgtctaaaaacaaaacaaaaacaagtaaaaaccatgcaacacatctacataaaatatatacatgtacacatattttagatgagattctttgtttttcccatttagtatatattctttcactcataacatgggagagaaattccacaagaaagtgagaatgtgacgacaggtgttggcagtgcacgcctttaatcccagcagaggcagaggcagaggcagaggcagaggcagaggcagaggcagaggcagaggcagaggcagaggcagaggcagaggcaggcagatatctgtgagttccaggccagcctgatcgacagcaaattccaggacagcctccaaaggaatacagagaaaccctgtctcaaaggaaaacaaacaaacaaaaaaaagggctggagagatggctcagaggttaagagcactgactaggctccaaagctacacagagagaaaccctgtctcgaaaacccaaaaagtgagaatttgaaaaagagaagaagaaagtcaaagtggaaagcattttcagtggactcagctgagcaggagacagcatggggccagatccacatgataaagaaaagtggcataatcacaggagagcaaacccataggtcagggagcagaagtcatattctcccagccctcgaggcctgatgcaagaagattgctgtgaatttaagaccagcctggggcacacagtaagctccaggccagcctggggtacagagtaagatcctgttgagtgaggagagtgtgataggctaaggattggccaggtagatgcaggaactgaaaggaaacaaagtgtcacccacctggcgcattgcccagcaactagagaggacctactctaaaaataaaaaatagtaccaggtgtggtggcgcatgacaaaggtaggtagattgcagggagtcccaggacaacctggtctacatgacatacccagttccaggccagccagggctacatagccagactcagtcttaataaacaaatacctttttcattgtatttttttcaaagtatttatggaatttatgtagaaatcaggcagtgacttaaagaattgaattagaggctggagtgatggctcaacagttaagggcacaggttgctcttccagaggaaccaggtttggttcccagaacccatctataactccaattccaggggaatctgatgtctcctactggtctccatgggcattgcacacacatggtacatagacataacattcagtcaaaacacacacacacattaatttatttatttattatgtatatagcattctgcctgcatgcatggctgcacaccagaagagggcaccagatctcactacggatggttgtgagccaccatgtggttgctgggaattgaactcaggacctctgggagagcagccagttctcttaaccactgagccatctctccagccccataattttttttaaatcttttttttaattcaactttttattttacatcctggccgcaatatcccaccatcctcttctccgagttcctctcccccattccatctctcacacccccaatctccctcttcttctgtctccagtcaggaaagggcaggtctcctgtgagtatcaataaaacatgccatatcaagttgcagtaagtctaagcacctcctcttgtattaaggctggacaaggtgacccagtatgaggagtagagtcctttttaaaaaaaaaaatcaaattaatcatcagtcaatattttggcctttgtacttctctttggtagtctttctttttaaaaaatgttcaaatttatttattattgtcattattgtgcatttgcatatgaaggctgtatgagtggcagtcagaggaccaccgtcaggaatagagtccctcttcctgccatgggttttagggtttgaattcaggttgtcagacttgaggagacaagcacttttaaccaccgaactgctcatccctctttctctgtctcttgttcttcatttcccatggaaataagtctttgggaagaaatctaaccacagaggctggtattctgaggttgaggagagggtggcttggtatgggcccctgtggtttttgggagctctggtggatggagccagattttaaaagacagatttgagtagcttattgattgcgatatttatattgtttgcttttcatttatatggggtttggttggttggttgttgtgtaactatcccaactgtttagttgtcagtgccttttcctggtataattatcatggttcaaggctccaaataaacccaagcagacaagagaggttgttgcaaggcaagatttaacacagggcagcacaaaagaccagagaaggggagggggctgatctgtaagggccccagaacagacttgggagctgaactgccacccctgaatgtcagttgaagcaagtatttaatcataaaattcataaatatttgttgccaagttatagttataattttcaccaaccaggatttagagattagaggcttccttgaatgtttcatcattgtcaaccaatatacaatgcaagcctttcagtccaaccaatcagatccattttttccttctgaggtgagggacagccatgtttctaaagaactaaagatccttaacaactatttctgtgatttaggagaaggcaggtcagctgctggaagattcccagctctcctagggcctgggaacccaactttgttttattctacaggtaaaatgaagacttaaggtgatttttttttttgcctgttcccaacataatcacttcaattacttgcatgtcttcaaaaatgtatcctatgtaaattcaagtccagagtttgactgtgtaccaccttacacaaaaggtaatatagtacgtgtaacttttccattgtcttattcaaatattgtattatatcattctagaaatttttgttgttgttatttaagttttgagacagggtttctctgtgtagtcctggctgtcctgggactgtgtcactgggtggatcaggctggcctcgaacccagagatcccactgcctttgtctccaaggtgcagtgtggcaatctttcttgttggactatctttggattgccagcccccagataatgcatggagtcttattattaattatgaaaagcttggcctttagcttatactcataactcaaactaacttgcttctattaatctacattttgttatatggcttttacctttcttcagtatggcacatccaaattgctctgagtctgctgacaaaatggtgtgcctaggttccttctaccagtttctctctctctctgtctctctctctgtctctctctctgcctggaagttccgcctattctctcctgcctagctattggccatttgttaaaccaatcagaagttgccttaggcagagatacatctttatagtgtaaacaaatattccacaacagtgcagggattaaaggcatgcaccaccacctccaggaattaggtcatttagtacccataaattttgttttacttttaagcttggtaagtttgaattttgaaataatatcaggcttaaaaataaccgtatacaattgggcagtgatggagcactcccttaatcccagcactcgggaggcagaagcaggcagatctctatgagttcaaggccagcctggtctacagagccagttccaggacagccagagctgcatagagaaaccctgtctcgaaaaaccaaaaccaaccgaccaaccaaccaaccaaataacacactatacaaatagcaccaatgactcctgtgtgccctttttgtagcttcctcacatgctaacaagacagagccacagaataccacaaacaggaaggtagtgttgacacaatgctattaagtgatctattgatcttgcttaaatgcttccgattaactcactaaggctgttcttttggctcaagatcaaatccaacatcataccataggctgcatttagtttttatgcccccttaatgttctatggtctaggagagttctttgggtttgttttttccccttggtcattttgaccttgacacttttaatgaatactaccctgtaatttacagagtgtctctcagtttggttttgtgtgacattccctcatggttaaattcaggttgtacatttaccaaaaaagccacaggaagttggagagatggctctgcgattgaaagtattttagaggacctgaatttggttcccagtactgacatcttaacagctcacaaccacctgtaactccagttctagggatcctacgccctcttctgtctttcttggataaccccccaacacacatacatgcatacacatacatataaacataaagaaatcttttttttttttttctgagacagggtttctctgtggctttggaggctgtcctggaactagctcttgtagaccaggctggtctcgaactcacagagatctgcctgcctctgcctcccaagggctgggattaaaggtgtacaccaccactgtgcaactaataagtatcttgtgaaggtactttaagtccatgtaaataccctgttggctagaaacaccaaagctttttgcctacagagtatcaaagtgttgagctaaagggacttggtgctgcctgctagccctgatgctggtgtaacagaagttgagccactgaccaagtgttactggacattagggtctgggccaggtgtttccagattcttgcttctcatccaaggaattaaaataaaggattacactgatttgcaaaagtgacgaggaaaccttattcacaagtgaaacctcagtacagatcagcaagaaatgcccagtcaacataacaggaaacacagtgggaaagtgctcaagtgttgcggaatagaatatttgcttaactatgtaaagatgtgttgcacttgtttatgttgcagaatatttgtttgcctgtgtaaagatgtgctgctccaattattgtttgggacttcctttcatgtggttcaacaggagcctggtttgtatgggtcatagcgcaggttattttttcctcacagtacatgtgcctaaagtgagtgtaggctggatgagtcccacagatcctcaatgtgtttcaggatgtgcttgagtagaaacaagccattattggggggatagttaagggaagtaaccatttccattgtttaaagcaatgaatgtggagcctgatgcaggtggtaggggtgtgggggtggtctcaggctgtgaacaggttgctatatgcattatcctaagaatgtgccgggtacatgtggtgacaatctcaagctgccaaatgcattattggagggacatgtgcacgtcctaaaccaagtggatccctagactgacaagcccccaaccccatgctggtcctcctccccagggcatgtcatgagcaccaagtgatccatcccaacttcctccctggattaagcaacagcataaagtacaaaggcataaccattctacaccccacgccccccacggcagtacaaagcaacccccaccccacaaacaacaataatcccccaggaagccaggagccccagacactcccagccatttcctaccttccacaccaagagaaaaggttctgatggtgaacatctcccccgtcttgggttgaggttggccaatgaatcagtcatcccaggaaggttgtgactagattgtaacattctccaacagcattattgacacccacttcgttgatgataaaagttgaggtcaaagagggaaggagtttctctaagagacaaattagtaaattgcagatcccagatcggacttccaaagcttaaacttgcttcccatccttgcaacagatttacagtattaaatgagccaatgcctgccaaaccatctctagtcactctgggaagtctaacgcacatccttgtgttgccatttggctgttttgttgttgttgttgttgttgttgttgttttaagcacaaattccctgtgaaatatattgaagattccaaatggtatcaatgtgtagtttaacaaatgactcaaggtaagctctcttgtggtcgtttttttcaggataagcatcaaaccatagccgggtggtagtggtgcacacctttaatcccagtgcgaggcaggctgaggcaggtgaatttctcagatggaggccagcctggtctacatatcgagtcccaggacagccagggctacacacacagacacagaaaccctgactccaaaaacaaacaaaagatcatcccattgatacagagaccactcccccccacccccgactctcagctaggatgttttaggatatgattagaatgggatgctcatggactaatggccttaccacatttgatagtgatcgtagtctaataagatgcagatctgccatgaatagaggtgaggacctgtacttccactattcgggacacagaaatatcattctttggacagccttgagtaagttagggagacactatcttggggtaggtgtggttgagagatcccttccaagggcttgcatgtaggtcagggactatctcctgtacctccaaagtactgagattacaggtgtatgtcaccacatatggccaaattgcacatcacattatgcttctgcctaatacattttctctttcaggcacattctttccttttcttcccttcttcttcgtttgtttcatgggtgatttgtttgtttggcagtgtcttgtcagccctgcaggtctggaacttgctttgtagtccaggctggcctcaaatgcaaaaccgtcttcctgcctcaggggagctgggattacaggtgtacactacttcacacggatgaccattttcagatacctagatcttgcatggcaatccaatcttacatctttaaaaatagcttcctctcatgttttctcctggcttttcaaatctcccagtggtctctcactagagctccagcttttctgtctaattaattctgttctgaaacctctgccatatacttctccttttagtgccaccattgacccaattcaatgcccactaataacttttcccctaccacattgaaatattctctccaaagcaaatggatggggctgcaagtatttcttatgcttccctactcccagtggtacctcctgctcagagatggtctggaattacattacaggagctattcccttcagtcctaaaaactgatccttcactgttgtggtcatggctccaatactcctgggaatgccggtatcatatatgtagggactctggccacagaagtgtgccgctttgagctcagtgcactgattggtgcagaggtggaagtaccccaactcctcagagagcacagacactgtgaatacctaaaacaaagcttcagtaagatcgaacccattgtagaaatgaaagcatttgggagcacagtgcaacattttcactggtaaacaaaatgaggcaaatctgagaacagttcagtgacaatcttgggcacctctgtatgcggggtgctgaccctgtccatgcttgccatcctaggcccagtcaaactgctatttgccttcagtgggttttaggccaaggttggttaagttttatccttggcaacagatcacttgaaaataaccccaattagaattactctacattgttattgtttgaaacagggcctcacaatgtatcccaggctaacctgaacttgagatcctcctgtctcagctgacctagtgcttggattattggcatatacctccctacccacatacaatgacttttttctccctgctaacttcttgcttgaatctgagagtataaaggggcaacttccctaagaaccagagggcattttagatggtcatggaatgtaccaggccttttctcttgggccaccaatcagctcccaatagtgacacagagacttaatagttatgaatgctcagcctagcttatgtttctttctggctagctctttttacttaaattatcctatttctcttcgtctaccttttgtctcagggcttttacctttcttcatgtatgccttactcttctgcttcctccagtatctggctggtgactgcttggttgctggccccaagagtgttctcttcctccctcattctcctctccttcttctctttcttctccagcctagatttatcctcctatatattctctctgcccaccagccctgcctaaccctcccctgcttagctattggccattcagcttttgattagactaatcgggtgccctaggcaggcaaggcgaaacagatgcaacacatctttacatagttaaacaaaagcagcagaaacacatgcaacacatcttcacatagttttgggttttttgtttgtttttgtttttttttttctttgagacagggtttctctgtgtagccttggagcctgtcctggaacttgctctgtagaccaggctggcctcgaactcacagagatctgtgcactgcctctgcctcctgagtgttgggattaaaggatgtgccaccaatgcccggctatctttacataaagtaatatattccagagcataaacaaatgtaacacatctttacatagttaaaataatgttccacaacaatgagatgaatgctaacaggagcaaaaaacagatcaatgaaaggagagcagcagatgtccactgcatggagctacaaacagaaagcttgccatggccaggctgagccatgggctggtggtcagacacctctgagctcttgctttttgtttctcaagttaattaatgaatttttaattttactttacttgagaaggcttctctgtgttgccctggctatcctgaaactcactcagcagaccaggctggccttgaactcagagatccacctgcctctgccttccgaatgctgggattaaaggtgtgtgccaccaccacccagctgcttcttgttcttgttcttcttttttctcctcctcctcttccttctttttcttctgagaattgttgtgtgtgtgtctgtgtgtggtgtctgcatgcatgtgtttgtgtatgtacacaggtgtgtgtatcatgtatctggaggccagaggttgatgtcagtgacttctttttttgagattgaaattgaagctcacagatttggctagactgtctggccacccatctctagggactctcttgtcaccatatctccagcactggaattacaagggcatacacctctatgccttgatttccacatggattcttcggatccaaactcaggtccttgtacttgcccagaaaccctttatcaactgacccaaaccctcaggcttgggctcttgcatgttaagaaattcagtgactccccaaggcagactgtctgggggccaagtttttcaatgagtacttttatcatgcctctgtggggcttaccattttcagtgagaaaatgaacgaatagagatggttcaggaccaaggatagcaacctgccagcctcaccaggaaacatcctctgctagtctgtgtggcagagggtcagggaatttccccaataggccttcctgtgcaaggccctggtaaaagcaagagcaggtgacaaaggaggagttgccagtcttggtccctcctgagtttgtgtggctttccattttagagccattatactgtcaaagccaggttcttccttcataccaggcacctggattcaagatacaaaactttcatctttatcatccctttaatatagcaagaaatctatagcttgtccctgtgagagaggcacactgagaaaaaggacaaaaagcagctgctggatctaacatgccaccattgtccaaaacgttacataagagagcaaaaaaaaaaaaaaaaaaagtgtttttttcctttagcagttaaaaaggatcaaggattttacagcaaagcttctcccagggctttcagatgtcagcagcccctgggaaaaaaaatccagcagactgggagtgggggtggggttactccagagcctgcaggaataagggtgaatatgggaggaagcctagcaaagactggcctgtgccctcagagtccatttgcttcctctgtgaaaaccacatgtatggatcgttagcttctccccatggggaagatggccaggggtgtggtgcccatgtgttttgagatgataatgtgcacagttctcaactcagtaagtccagggtggggctcaaggttcagcaactctaacacgtccagggctgccaggctgagtttcctttctcaggcacttggctattgcattttcctcctataagtggaatttgtacagagtattgaaaactctgacaggaccaagactggctagacctgcctgctactagagtggtttcttgttttcaccctgggatttctcctagttctggtctaaactcttcagccagctcaggagtctgccatcccagctctcagcaatccctacccaaacacagcctgccttggtttctgatgatgcaagccggaaagtctaaatgaccatggtctctatgcctcagcttcccagatgtcttagggtttctactgatgtgataaaacacgacaaaaaatgagttgtgggggaaagggtttatttcatcttacagtccatcatctaggaaagttggaataggaactccagcagggcatggacctggaggcagactaatgctgagcctatagaggagcaattgttggcttgctctccatggcttactcagcctgctttcttaaatgcagccagaacccccagcccaggagtggtaccacccacaaggagatgagcctacccacatcaaccattgattaagaaaacaccccattgttgagacctaacacccataggcccacctgatgggggggcattgtcttaattgaagttccctctccctaaattgctctatcttgggttaagctgatgcaaaactcaccaagctaggaaagaaagttatccctaattcaatccccaggacaatggagggtcaaaggctttcagctaagagactgattttttgttttgtttttggcttttttgagacagggtttctttgtgtagctttggaggctgtcctggaatttgagttccaggagctccaataccctcttgtagactctgtaggcacctgcattcacatgtacatactccccctctcctccccccccctctcacacacacacaattttgaaaaataaaagaattacattactataaagggaaactactatctctagagtggctaaaatctctaagactataggtagatgtactggctagagagagatgacagggaggggtagttttatggtgctcaggattaaactcaggccttttacaaatgctagacacacattctaccacaggctacattcccagccctttttagtcagccttgaacctgctctgtaacccaggctggccttgaattcacaaaaatcatcctgcttcaacttcccaagtgctgggattgatctgatgccatcttgcttagtggaaccctttttagggagatgtccaatgtggagtaggttgtagttatatacagaatgtacgagtactacgaaagccactgagatttgtatttactacgaataactcaaaagggaatgccatctttcccagcaagatggctcagcggataaaggctccttactgccaagcttgatgacctctgtttaatccctggggtccacgtggtagaggtagaggaccgactcctacagacagttgtttgagcctcacatcttctctctctctctcatatgcacactcacacaatcaatcatcaatgcaactgaaaaaaggacaaatttaaaactgagtgtagaaatgtttataatctgcactttgggaggtagaagcaggagaccagcattttaaggttagctttgtctatcttggagcttttgttcaaggccagttggagctacctgaggctctgtctccaaaaaacaacacaacaaaacctccacatcaatttaaaattagggacattttatccttttctttttattccccttcaacttttaaaaaaatttaaattaaaagcaatcttattttacataccaatcccagttccctctccctcttgcccccccagcccccccaacatctccccatccactccccagggagggtgagacatcctatgggggatcatcaaaaactgtcatttggggcaggactgaggccctcccccatgtatctaggctgagagtatccctccacagggaacaggctcccaaagcccattcgtgcactagggataaatactggttccactgccaaaggccccatagactgcccaggccccccaactgacacccacattcagggggcctggttccgtcttatgcaggttatccagctgtcagatgggtctgtgagctcccagagattcacagctaagcactgagctgaactcctggaatccagttgtaaagaatatccttttaagttgcagtgataactacagctttcatcagggcagggcaggatgctaggagttgaataatgagcactctctctctgttacactttgaacctgatctacccacaacaggttcatgtgtttgaacccttgatccccagctggtggcactatttttggaggttttggaacctctgagacatgcaatctcgttggcagatgtaggtcattgtgggctagcctttgagggctatagcagggccttcccctaggcctctatgcttcccagttcaaagatgtgaggagtcacgcccctacccacaaggactgagctgtcccacgcaccatgtgttctagaccatgaaggactatatgccttcagtgaagcaaaacaaagctgtccctcttgaattggtttggggaggtatttttctcatagctgtgagaaagggccctgtctcaaaacattaaaaagaaaacaatgaacaaatataaaccccataaacccataccccctaatagcttagcaaggtggggagggggcatgcttttaattctagtacttaggaggcagaggcaatggggtctctgtgagttccataccagccagaggtacatagtgagactccctagaaagctctggaaactggaggtgaggggagagtgctagatctgagctggaagtagaagaatgctcctgttcccttgtatcttaaccccacagctggccttcacttctaaacaacccaggctgagtttctgcaggcacagtagaattctcaattccactgggcacatagaaggcacttctcaatcaagggtggtattttgcatctcaataggttataaagtatacaacagtgtagctttaatttggcccataaaacaatacttaatgaaggctggagagatggctcagtggttaagagcactggctgctcttccagaggacaaggtttgagtcttagcacccacatggcacctcacaacaatttttaactacagttctagggattcaatgccctcttctggcctctaggggccctgcatgcatgtggtgcacatatatacaagcaggcaaacatgtaaggtaacaataattgaataataaaatcaatgctttatgtgtacggatgttttgtccatatgtttgtattgtaccacatttggtcccaggcgcccacggaggttagaagagagcgtcagatcttttagaactggaggtatagacagttttggaccaccgtgtgggtgctggaaatcaaacctgttcctctggacgagcagcgagtactgttgagtcatctctccagccctccttatttttgttttttgagacagggtttctatgagtgtagtccagcctctctgtagaccaggctggccttgaactcagagatctatatgcctccctagtgctgggattatcacaatccagctccagtcattctaactatgaacaaactgaacatttttgtgtatttcaggatctttttgtttttcgtaaatcaaggatccaatgaggtttactggctcccacagatacatgcacaaacacggtgaacatatagaaagcaggcacacacacataaaaataatgtaacgtataacaaagccaggcattggtggcacatgtctttaatcacagcctctgtgagttcgagaccagcctggtctacagagctttacttggtcacactgaagatcccagtgtgggcttctgggaatctgaaagtatacacactgggtgtaaagtggtcagcattttgccactgatggagacaaaagaaatgtccatgcggcttaggcttttcctttgaaggtaacagtacttctgaattgggcaagctttgtatttgacaataggcttaggagcttgctgagggggcaggcactggtctagaggttttgaggtggttttcagaggctgaaacaggccctgactacaatggttccatcaattttgccatggatgtaaagcagcttactgaaatgaaagtggcacagctgtgagccttctacccatgtccaaatctgtccaggagatagtgactggttgagcaccgagcctgatcacaacagcatgccccagatcctgagggtctgtgagccaccgagaaggttcagtttatttttgaatgcctgaataggtgtagtaaaatggctgacagtgcttcattcactcttaagaaagcgttcatccaaggtgttcaagtgagctagtggacaggtagtttgctctttcccatgcttcccagtgttagagaaacaccagtattttgaaggggccagggcaaagctcatgaataggcatgctgataaatgttgtgcctttcacaattatgagatacaaagtggttttatatcgttaaacaaacaaacaaacaaacaaaactgctgtagggttggagaaatggctcagcggttaagagaatggttaaaagaactctccgagaggaccagagttctactcccagaccccatatggaggctcacaaccattggttaactccaattccatggtatctgatgccctcttctgggttttgcaggaaccaggcaaacacgaagtacacatacacatacatacaggcaaaacaaatgtacacataaaataaaaattgctgggtatggtggcctgcacctttaatcccagcactcaggaggtagaggcagttcaagacaaacctggtctatctacatagtgagctttaggttagtcaaggtcacatagtgagaccatgtctcatcccccttcctaccctgtcctccacccaaaacaaaacaaaacaccaaaaccctttttgctcagaagccagggatggtagtatacaaccatgattgcagcattcaggaagttgtggtaggagagagagcaggaggccagtgtaggctacaaagtgagactctttttctaagaaataaacaaccccaaacagttgctttagtcctgagggtgtagctcaatggtacagcacttacttatgatgtacgaggccctgattttggttcctagcacgcaccctctccacccaagaaaaagtagctaacggtaactgaagaaaccaggacacaaaggacatggggcctccggagaaggtgcaggtggcaaagtgtttgctgtgaaagcatgagagagctgagttcacactgcctgcaccccacaaaaagccaggtatgatgtgcagttgtaactccagtgggtctagggctttctggccagccagtctagtcaaccaattaagtgagagaccctgtcttaaaacaacaaagtggagaagcaactgagtaaaacatgtgatgtctacctctggcctccacataaagtggccccaccccgaatgagcaccaaggagcactttcataatgtaaggaatgcttttcctcagtttcacatggtgcttatgtacccatttcagaagcagaaattctagtgctgggattaagtagtaaataaaactgaaaaaaaaaaaatccattagccgggtgttggtggctcatgcctttaattccagcactagggaggcaggggcaggcggatctctgtgagttcgaggccagcctggtctacagagtgagttccaggacaacctccaaagctacacagagaaaccctgtctcgagaaactaaaaaaaaaaaacaaacaaacaaaaaacaaaacaaaacaaaaacaaaaaaccaaaaaccccattatacctttaactctctcaaagaaggcgtattcaccattttactccaagccagtaccccagggtatgcagacggtcaggaagtatctactgcctttggtagttatcttaaccacctctgcttaaaaacttcatgaacttgacagtctagcttatttgctggcccataaggcttcgataaagatcagatgcaaacgccccctttctgtgttcaggatggcaggcagccgggaggcagcagcccaaggtgagctatggacaaattttcactatcaacctatttgtacagattttcttgtacatcaaacttataggaagtcattccacttaatcctcacaatgacccaggagataagcaggttttacagttttcacttcatccatgaagaaactgagggaacatgcatctaagggaatccaacggcggcgtctctgactattatgtatcttagacatgggcaatagcgacttggaacccacatgatcaattactatgatgcaattgcctttggcttatttaatctagaatattctaacctacatcaggaatgtttgaaaattttgtttttaagacttttatgtgtatgaatgttttctctgcccatatgtctgtgtacatgtatgcctggtacctgcagaggccagaagagggcatcagattgccctagaactggagttactgttgtgaaccaccatgtgggtgttgggaatggaatcatgttctctgcaaaagcaacacatactcttgattacagagcctcctctccagtccctaagtcagaaacacgatgtcctagcatttcaagctggctttggtggccatgtgcctataatcacagcctttgggaagtagaggttgggcgtgaagactcaaggtcagcctcagaaacagcaagttcagtgccagtctgggctacatgagattgtttcaaaaatccaaaataaattaaaaaaaaaaaaaaagtaaagttcctagtatttcatgggaagtcccatggagcttgaagggtggcaggaagggatacatcattagactatattctatacaccattacaatataagttggccacaaactggttatgtagcctgtctgagtactgggattacaggcatgttaccacacctggcttatgcagagccagggttgaacttaaaacaacctacactaggccagcaagcaagtgtaaaacttcacagctggtgcaatggctttggaacatctgatgccctgagatcaatcccccagagccacatggtggaagtacagaattgactctcaaaagttgtcctctgacctccctacaagctataggacgcacatgaccacacatgtgagatgaataaaagtattattaaatcttaaaaggaggctagagaggtggttccagggcttatgagtgcttactgcataggacccaggttcagctttcagcatccacatctggtgggtcacaaccaactgtaactttagctccaggggatctggtgccctcttctggactccatggacattgcactcaatgtgcacattcccacacactgaaacatttaattaaaaatatttaagacaaaaaaccccccaaaactttagatcacctttatagtaagtctcaagaagatcttggtaaccaaaaattcaaaaaagttatgtaggtacagaattaactttagggttggttcaacagacaaagtacacctaaagagcataaaaattctttattcaacctaatccagctagtattgagttttctatattaaaaacaagatattaaaaaaaattacagcagaattagcaaggcagtgactaatgaagtcactagatttaattatatattcttcgatcatttggtaagtatgtaatgaacaatattttcagccacttagatggagttaactgcttcaacagaattgtactaatcattgaattttataaaaaagagttttaaaacattgacatttctagaaataacagaacaacattatgaaaataaactggagaacagtatactcacatattcccgaagtctctactgtctctcttctctactacccttctctttattcctgtcctgtcctagagggcagaccaacactttttaggagctattcaggcctaaagtacctctgtcctttcacagctaattctagaaattgtctaagtgtgaattacattttagagatgaaaataacagtggtttatacagtacagttactaaaacttgaactagtattttaaagctgtcagctgggcagtggtggcccatgcctttaatcccagcacttgggaggcagaggcaggcagatctctgtgagttcaaggccagccttggtctacagagtgagttccaggacagccagaactatacagagaaaccctgtctcaaaaaacaaaaacaaaaaaccaacaaacagctgtctgcccatgctctttgttgctttgtggttgggtggccactgtccagggaggactggcatggggtacttattttcttggaataaggctctttaaatttgaaactattcagttacaaggctagcatctgctctggctcacaggcacttgtggttccttccccatagctctccaaacctctacttcctgcccccaaggggttaaaggtgctttattggctttcatgggccttgatgccaatcaaccccatcttggacattaatgtagtacatagggaactgagtgcttgcataactgtgaaaatgctgctcaatttaacaaatttatcaaggaaatttctaatatatcttttcacactgggaattatagaagccagtatatttcataattacagctagacatctaagttatttttatgtataatcagagctcataatttctcttcagaacaacagcagtgttagggttaactcagtcaaattgtcccttataccctagataattacaactctggatgttcatagtcattcacattgacaccataaaactcagatatccaacctacagaaagatatcagtctttactaaaattatgttttatttacaatctaacatagctcaatctatatttgttacactccaaaagtatccacttctcagtaagagggaccatttattatcatgcatcagatactgtgaactgtatttttaactcatttttcattttaatcaatgaaaattaaaagaacattcagattgctgaacattaaaatagtcactattaaacatgacctaaattcattgttgaacaatgaatataaaactagttaaataaagactattaaggagctagccccctgaatatgacaattagaatctaaagagggctggtgccttagctcaattggtagtgtttacctagcatgcagaaggccctggattcaatcataagcattgcataaaaacagcaggtgcgatggtgctcgcctgtgattgggaggatcaggagttcaaggtcatcttcagatacacaggaagtttgaggctagcctatgtaagagaccctgactcaaaaacaaaacaccataaaaacatcagtattggctatcctataaatggatgtagccaaaaccaaaaacttcgacattcattagatttgttttcatcattatctcaatgactgagacaacacgctcaagacctcacttaggttcacctactgcttgttctgtctatgagattgcaaactcagagttgggaccaaatttgtcttgttcaccactgtatctcacagcaccctgaagtggctgaataaatgggaagtgattaacaaatacctgaataactaaaccaatgaaaaaaacagtaaatttgttatctttttttttttctcaagttgttctctgcttaaattactaactggcagctccaagttctaaaaatacaactttaaaaacattaagtgataaaaggtccttatacctcatttctcctattcctaccctctccttccctccctcccaccttttctaaccccccccccagatacatatacagacactcacagacacacacgacaacaacaactacatgggtcaaaattacattatgaactatgagatgtcaacattgcataaataaagtttaatagtgaaaaagtgatctggaagccctggaaactgaccctacacatctgagatgtcacatgggttaaggaaaaggcaacagcatccctgttgttcagataaccatttcaatgcttacatacatttttttggtttgttatttattcagaactaatttataatttacatttcctcatattaacacaggctcctgtttagcaagtaatcaaattatgccagtgagaaaagtcctcacagtaccttcatttgagttggtattcctaagaaaacactgaacatgagtatatacaaaagaggcatcagaataaaacagcatgtccattttaatatttgtacagttttagctttacatttttgtctggaaaaatatgaacaaacccaggtttaccatgctaagataatggtttagccaacggctgtcaaagcagtgcatacaaataaccaggttgaatcgtatccttagttctgtgattactgagaggatcccctgccctgcgtgctttattacatttctttaaaagataggagcagtagcttatcacaagtctccactagtgcattaatgatggagtcacaacaacacaacagacttgtcaggatgagaggcctcagaacaaccagaagtcagttttatgcttcttcttgctctggataatttaggattttgcggtgtgcctgacgtaaatattgctgctgtttgaagtaaaccttaaatgctccttttatggcaacaaaagcaattccaccctaaaataaaaagggaaattaattttttttgtaacgcaggcttagagaaacaagaaagagcactttatatagatcatgaaggacacaatgacgccaaatgaatcctgataactgcaaggaaaacacttttctacgaggggctgagactgggaaagaagcagacacttcaagtagcagaggaagagcttccttcacctggcatcactcttgagttgctttcttcccatgaattctacattcattcgatagaaaagagaatgccagagcaccatgtggactgtgaccaacgagggcaagtgggatgacaggaaacagcatgagccagtttcatctcattttgtttatttatgatgctggtactggggattgagcccagagcatattccagaagagaaggtacctacagaaagggtccagaggccagattggcaacagtaggacctccctccctttcatttccctcgtgctaagatgacagtggggctaatgaagagacagagcagcggaactacatagagcccctacagaacctctctcttcctttaaaaacaaatacagctcactctcttctgtatactgctgagacaagtaatattaaatccatcttaccaagattgtcctttgtaaatttgagttaacactactgaacatcagtttaccaactattgtcgcaatagtaggaaagacaagggctccacacaaaattctggtagctgagacatgatcagctaaaggattagcttcagctggaattcgaggaacaggacaaccaatccctagaaggggaagcattaagttagcactaaatcttagaatagctaaaaaataaatagccttaagctttaaacattagcgcccccaaacaaaacaaactaccaccatccaccaaaaaaccatgtgatggtttttctaaaggtcaattcaacatgtactttacatagccacaattcagtgccttacctggaaatatactgttcaaaatttgtagtttatttgagtatttacgccatagtctgagcacatagtcctcccagcgaatcattttgcccagtatcagcatgacaggaatagtaggaagtccaatcaaaaggaataaagggtcagctcgctccataacatccagcccttctttatggcctaccacctgtaaagcagacagcatttgctacagttatcttctcatctaaagcagcggtacatttttgtttggttggttttttgagatctggtttctctgtgtagctctgactgtcctggaactccctctgtatactaggctggttccaacctcagagatctccctcccgagttctgggattaggtgtgcaccaccactgcctggctgcagtggcacatatttaagaggtagacattcagtgcattttgtaagaaatgcttagcttcaaaacacagaaacacaagttaaaaaaaaaaagctattagtcttgtttttttgtaagaaataatactgggaatgaaaggttaaaagtggtgaagaacacttgctgctcctatagtggacccagtttcaattcccagctcccacacggcagctcacaaccacttgtaactccagttccagggatgtgacagctgttctggcctctgtgggaactaaacacaagtggtgcagaaacactcccacagactaacatatatatgtataaaaaaataaatctcaaacatagaaaactaaaaataaaaaagaaagattacccatggccgaatgaggtagtgcacacctctaatcccagtacttggaacttagaggcaggtagatctctgttactttgagaccagggttactcggtgagcccatctcaaaataaaacaaagtaaataacaatttagatgggcagtggtggcacacgcctttaatcccagcacttgggaggcagatacagatggatttctatgagttccaggccagcctggtctacaaagtaaattccagggcagctagggctgttacactgagaaaccctgtctcaaaaaacaaaaaccaccatctatccatgagggatggtggataaaatttccaagctactgcactttatgttggaacaaaataactttacaaaaatggctggactacattggttacatctcagtaaaattgtgaagggttctgttatttgagttttgttgttatttaattttttgagacagagtctcactgtacagctctggctgtcctggaactcactgtagaccaggctggcctcaaactcaagagatccacttgcttctgcctcccaagtgctggggttaaaggcatacacagcttttcattgtagcaaccatcttccagtaattggctaaaatgacaaacacaaagggaaagatgaaaggcacctgctgtgtgttctctagatggtttaggaaacatgaagtgttcctctggccacataacatgcaaatctgtatacaggaaggatgatactgtacacatcaaggaaaagggcactgttcaaaaaggaatgtcccttcaagttttatcatggcaaactggaagtttactgggtcacttggcatgctgtggacatcactgtaaagaagttaagggaaaggttcttgcaagagaatcaatgtgtgcaatgagtacattaagtactctaagggctgagacacctcctgaaacaggtgaaggcaaacgaagagaaaggcacctgggttcagctcaacccagagaagcacactttgtgataatataaaggggcctgagaggctggaatccatattctatgaattggtggcttaatagacaaaaatagagaatctactagactaagtatttttctttggagaaggggagggatgcaccaccatgtaggatgagacatctgtcatttacgtccattcctcttcctcaacttgtcagtgagctctgggactgggataattttaggtcctatttgtcctctagaagatgtttgtgtcctgtgtttccttttaggtaagcacagctgagcatggagtaggactagccttcaaaagacagcctaaaaacacagctagcagctgaggctgtagttcagtggccacagcgttttggttatgtaaggcctaactgtaatggcacattgtctgttaattcctagctacttgctacttaggagttcaaaagatcttgtctcaaataagaaaaaaggaaaatattttaatgtttatggaggttattttcacactagaggtagggcctaatgttgtatttttgttatctgaaacaggacacagaaatcagtaagctagaataagtttatctatggcacaacattgtttttagggtttaaatgcatcagtgcttaaaaggcattcattttagtgctggggaagttaataacatgctgtcttttcaataaaaggtgcaaatggagggtgggaagatgcttagtagataaaaacacttgcactgaggcctaagtgacctgagcctgatcacgggattacacaaggtgaaagaagagctgacttccaagagttgtcctctgacctctacacagaataggtctatacacaatgcatatactccaaatgaaagtttttttttaaaatctaaaaaatgcaagtgaaatttgactttcacagttctttatatattctgggtatgagtctcctgtctaatgtacaggtagcaacaatctttaatcattctgagtgttatgggatatttgtacactgtgtaaagatatattgctgtgactggtttaataaagagctcaacggtcaatagctagacaggaggtacatgcaggacttgtgggcagagagagaggggaagtaagaagaggaatctaggcgtgcaggagagacgccaggagatggagaacaagcaagatgtgaaggaggagaggtaacagccatgagccacatggcagcatgtagagtaataaatagaaatgggttaatttaaattataagaacaagttaggaactagcttaagctataggccaaactttcacaattaataataagtctcagtgtcatgatttgggagttggctggcaggacagagaaagatttgttacactgaaggctatcttcaccctggtgattacttcaggggaaattcttcacctatgtttttttctcagatctttgatccactctgaactggtttttgtacagatatgaatttagttccactctccttcaagtggatatcctgtttacccagtactagttattgaaaagcttggtttttctcctcaatgtatgcttctgttttgagacatgatcttgtatatcccaagctagctgtctcaaacttaccatgtacctgaggctgacctcaagctcttcatcttcctgcctttactcctcacagttacagacactggacatcatgcctgaaccaatgcatgtttttgacactattgttgaaaattagaattaatacacacagccatatctacctatgttttttattctattccattggtctacacgtctgttttgtgccagtatcatagtattgttactaagactctgtagtaagtctgagatcagtttatctgtttttgtttttaagatagtcttaccatgtaacccttgctggcctgtaactcacagaatattggagttaaaggcctggaccactatatccagctgagaccaagtatagtgatatatcagcattgctctttctgctcagcattgctttggctagtgagggtctttcagtgcttatgaattttaggattgccttttataatcttgtgaaggcactggaattttgatgcagactatgttgaatctggggtttcattttgataatatacacttttttgtttgtttgctttgtttttgggagataggtttctctgtgtatccttggttgtcctggaacttactctgtggaccaggttggcctccaactcagagatctacctgcatctgcttccctcatactggaaataaatgcatgcaccaccactgcccagcaacagatatttatgtaatattaatcctgcatatataaataaataacattttatgtgtatagtgtttgcctgaatgtgtgtctgtgaactatatgtgtgcctagtgcctgcagaagaaggttgggctccttagaactaaagttacaaacagctgtaagatatcaagtgggtgctgggaatttaacccagatcctttgaaagagcagcattattaaccactaagccatctctctagaccttaatgtcttcttcaatactctaaaattaagtttatttttaaatattctattttaagctactatgaatggagtttttctaatccctaaatggactaatgaactgaatatagttctcaaaggaagaaatacacaatggctagtacatattaatatttgaaaaggtgtccaacatcattagacatcagggataccaatcaaaactgctctgagattccaacccatcccagtcagatgactaacattgagaaaacaaaggctggccagggaggatatgggaaagaggaatcctgatacttaaactagtgtagttactatagaagttggcatagaaattcctcaagaaaactacactactctttattcatcaacagatagatatggtacacataaacaatggacttttatttagccacacacaaaaaatgtgcaaacctggcaattgttatgttaagcaaaataaaccagactagaaaaactatgtgctttctatcctatgcagaatctctatctaaacatattacatgtttctgttatgaaactaaaagggggactgtgagaaggtcttataagaaagtagaaggtggggggagagaggtaaatagaacattcacgtgacaggaaattagtagaggccttccttggagggaaaagatccaacaagaggggaggggaaaggggcttaagaaagaacaaaatatgacagataagcataaaaatgccacaataaaactcattactttcaatactattttctgttgttaaattacagttttgtcaaatggtgccacaaggctggaaccccagcacttgggaagcgccaagataggaggatcaggagttcaagtaaaaagaccttgtttaaaaaaaaaaatggctggtaggtgtgccgacactcctttattgctagcacttcatctgatctgaaggtggcaaaggcaggtgatctttgaattcaaggccagcctgctctacaaagcaagttctagggcagccagggctgcataataaagagaccctgtctcaaaacacaaacaaacagtaccccccccccaaaaaaaaaccctcagggtttgtgaggaaatggtatgtagaactcagtgagttcaagatcagccaggacaacatagtgggaccctgtctcaaaacaaacaaaaaaccaacaaacacaaaaagcaagtgaagaatctcattcaaattccgtaactgaagactggagacatggagaagtaatgagaattaacgggatagtgatgtggctggtaatttatatgaactccagagttgatcacagagcaaactgaaaagaggaaatgttaaggtcctgggaaaggagtgctgacaggagcctgaggcagctgggtgcaaggcagccccagctcattttctcctttttatccagtgcagaaccttacctcatggaatggtgttgcccacattgagggtgtgtgctcttacctctactattaacctaatctagataatccctcatagaagtgtccaggtttgtatttttagtgactagttcctgtcaagtcctcaacactaggcattagagtaatgtggaggcaagaagttcagaagttcaaaatcagccctgggaaacaaatcaaattaaaggcaagtctggccatatgatatcctgcccattcatgtgttactaatgttaactgtggatttgtcatgaactagtctgcctcacccccacaaaaaaaacaaaaacaaaaacaaaaaaacacctaaatactgttggtttgggccgggcgttggaggtgtacaccttgaatcccagcactcaggaggcagaggcaggtggatctctgtgagttcgaggccagcctggtctcctgagtgagtgccaggataggctccaaagctacatagagaaatcctgtctcgaaaaaaaaaacaaaaacaaaaacaaacaaacaaaaaaactgttggtttattgaggcatattccttatcaaatatatacagataactgcttctaaagatgctgtatagaaataaaaataagtaaatagaagtataagtagtagaatatccaaaacaatgttaagaaacagcagtaatatatattcttgtcttacttctgactttcaagctacatttataggatttttaccatggaaactttgctaacatattcaaatatgcatgtttaggtaggtaaaagatatcttttcaatacttttaaatcacatagtacctatctactgttctagctaatcactcattcctggaatacatgtttcaaacaaggctgtaaatgcaaaggtgatttctaaacaattaacacgcaatacatatttgtaacttttattatattggtacttccagtctataagtacaaattattaaaaatttcaagcaccagatcaagatttttcttataattagcaatcaattgttcccttttccttaattaaaaaaaatgtttatggagttctgtattccattaatatttacatacacagttatataattgttccctagtatttcatttatgtataccttgcttgaagccaaatactgagacctacctaaaaataaaaacaaaatggttaataaactgctgtaattttatacaaagaatgctatggagatcttgatagttatgtgaaaagatcaaaactcattatgaaaaagaaaccgaggctataatatgaaattagctttagtggctggctacctgagaaggtgattggggatctagacaaatgaaggacaggggaactttacactacaccaatctgtctaacactttgtttactgtgtgtatgtgtggggtggggcatgctcatgtgtagagttcaaaggacaacttctttggggagtcaattctctaagccctgactaccatgtgagtgtttggagactgaacttgggtcactagaatttgtggcaagcatctctacccactaaagcatctcgttggctctaggctagtttttatgtaacttattctttaatcatgacagtaccattactcatttaaaacaataaattaaaaaactcctagcaaatatttaataaccttcacatcaaaagtattatcactgaatagagtagaatggtgaacctgcatcactgtcactgctccataagtcacagctgtccaatagatagatccaaccattattcctgctgcagcaaaagggcaagcttttgagatcagtctatctgcaagatccaagacataaacgactggacctacaatatgaagagagaaaagtttcaatacaaggtgggtttttagaatacttcttcagtattttctacaggtctaaaacacctgtatcaaattagatgttttaaaaatagtcgttaaatggacagttttagatttttatttttagtagtgtgtgtgtgtgtgtgtgtgtgtgtgtgtgtgtgtgtgtgtttatgcatgttcttgagaatgcgtgtcacatactattttaaccatgctattttttttcctttcttgttttaagggttaatttatttactgtatgtgagggtttttcacctgcatgcatgtctgtgcagcatatgcatgcatggtgcctgcacaggacagaagagggtgttgggtcctctgaaactattattacctatggctatgagtctctatgtaggtgctgggaattgaacccaggtcttctgcaagaacagcaagtgttcttaaccagtgagtcatctctttaagtctcacgggtattttcttatagctacacaagacaatttattttacttcattttaaatacactctatttagttgaaaattatcttctaacaagcttttaaaaaaatacagtatttcaacagctacatgtgccaattatcaattatatgcttaatatttcggaagtattttacttgccattaagtccaatttaatttaacactagaattttccagggaagtggaaagatcttagacttgttcaaaataaaaccaacccgagcagggcggtggtggcccatacctttgatcccagcacatggggggcagaggcaggtggatctctgtaacttcgagaccagcctggtgtacaagagctagttccaggacagcctccaaagccacagtgaaaccctgtcttaaaccaccctcacccccccaaaaaaacaaatctgaatgtctacatttaagcaaaggtatgtaacttgttagttaagtaattgtatttattgaatacctctctatataaactgttttttagacattttcttagaaatgtatgagttctatcacttgttttcttggcgcctatattctaaagaatgataaacacaaaagcagttgccattattgtacaaagaaattaatacagtcatttgagtatagaataattaaacatacaaggaaaaaaagtcttataaagtccctggtcaaaattccccactgatttctagagccagccactgtaaagagaaagatgacattgtgaaggaaagattccacagatggcagcattggaagccagaaaccacagtacataataaaagctctacatttgaacttccttgtgattgataaatctgtaataagaaaactaaagcctcaagagctacaaagtctctcctatgcatgttcccattatcaataccaggcacactggaagccatcctttcaactgtaaacccatggtatctccttgctcactaactcaaggtcatacatagctctggaagttctcttcccactcttcttcatcatgtccccttactgatgtcttatttctcattatttcacttatcttaaaaataaacttaatttttaaaaaattacaatgtatgtatatgcaaggtgtgggtaggtgctttgggaagccaaaggacaccttcaggaaccggttccttctataccatgtgggcccaaggaccaaattcagattggcgggcttgggcaattgtccttttctgcggactctttttaccaatcccctaaaatctttttatttattgttgttgagacagggcctcactatgtagcccaagctggaatgaaactcactaagttgactgggctggccttgaactcacaaagattcacctgcctcatctccctagtgctgggactaaaaatgtgcaccagcattcaaaaattttctgatccttcctgtcctactaatccatttccttgcttcctttgaatactcaaaataatcgtctaattttccaacaaacatgttctgcccaagttgttcatgggcattactaacgacctccacatatctaaattcagtgaccaaatctcaccaccatttactgacctatcagctacataaacatctttttttttattagaaagaaaattattttacatgtcaatcccaggtctcccccccccccccaaacaacgccctacctatcccataccctttctgcttcccagggagggtgaggccttccatagggggagtcttcaaagtctgtcatatttgttgggatagggcctaggcccaccccctgtgtctaggctcagggagtatccctccatgtgggatagactcctaaagtccattcttatggtagcgataagtactgatccactacaagaggctccatagatttccaaggtctcctcactgacacccacattcagggggtctgtatcagtcccatgctggtttctcagctatcagtctggggaccaagagttttcccttgttcaggtcagctgttcaagatattttcttcccaacatatggttggttcttgcttttccagaacataccttattactcacttttcagtttcctttgctaatctacaccacttcttacttactttgctatatttccctttcctaaagcattttcatcacataaaacttattttacttaccaaatctatttccatttactagaacaatggcgaaccacagccccatagcgaaatctaactagctgtctatttttgtgagtaaagttttactggaaaatagccagatgcaaagtctaaaacatatttatttatatagatctttagagaggagatctgcctattcctgtattgaatgaaacacgggctccaaagggaaaaaagttgtgactttatttattgatgtatcccaaattcctatgattctcaagtatttaactgaattctttaacagctgagccatctttccagccctgttagtagactgaagtgatatataaaagtcatatgtacttggatgaaaatataattcctaaaagacagcccataattattttcattagatcctgaaggacaacctaaatgcctgaatgtttttcaaatagattgcaaaaaatcataccaaaatatgctagactttcttgaggaatcatacggtatgaaagactagtctaagattagttttaatatttggaaggaagaataaatacttagtattaagcataccattatgataaagtgccagccaggagttaaagattatctaaccaagtattttgttaaaaacaatcactaaggggctggagagatggcgcagaagttgagcactggctgctgttccagaggtcctggttcaattctcagcacccacatggcagctcacaactgtcttgcagctccaattcaggggatctgacaccctcacacagacacacatgcacataaaaaataaaaaaggaattattaaaaaaaattaaacaatcatgaaaaccctatgaataataacccccaacccagtgtgccaatcaggaaacttggtgcagttgccatgacctaggatcctaacttttaggaatacaacaccagattacaacacaaagagttatggagtgtgggagaagacaaaatcttaaccctttgaaacttccatcctaacaggaaagagaaaacataaattaatgctcaatacaaattaaccaagggcacaaaagtttcaatattttagaaaggcattactaatctttcagcactgattgatgactaaacccaaggcttcatgtatgctaagtgtttcctcacttatcactaagttacagccccagttccccagtccacataactgggttttcaatggcttggtaggcctgaccacatatactttcaacagtattatatttatataatggatagcaactgaatctttgaacaaataacttttagaaatctaataattcaagaggtattaaagaagcctgtaaaaggaagctttattgtgaattctcttatacaataaagatttttataaagacagaaactatcctagtattctgggtaaattcaagtttttacatttcaagtttgagtgacaaagaaaagtaaactgaaacttttattaggctacttcaaaaagaagtaatcagctttgtctcaagacattgtaagcataactttgctatagctgtgattcagactcaggttgaactgggtgtggagtcacacaactgtaaatcttgtgcttctatcctaaggattaatgatttttttgtttggttggttggttttgggtttttgatacagggtttctctgtattgctttggagcctgtcctggcactctttctgtagaccaagctggcctctaactcacagaaacccactaagtactggaattagaggctgagtcaccaacgcccagccagattaatgatttttaaagacttattttttatttgtgtgtgtgtctatatgcaaatcctctggagcagaagtggcttcgagttgtccagtatgggttctggaacccaaactcagattctccttagtcaagggcagccagcacacctgaccactgagccatctctgcttttgtttgaagatgagtctcactacatagttatggctgtcttggaacttactatgtagagcaggctggctgtgaagtcagctctgcctatggatgtttagagtgctttacaatattgttttgcacttacacaatgaatgaaagcaccttaagttattttttcctttgtgattgtctaactgtatagctcaggccagtcttgaacatcctatgtagtttaaggtggccttgaactcactttttccactctactccttgcctctatgcagagctgtcatttctctcacacatgaaaacaagcaaacattttctatatctacctcattttcttgtattaggaaagcacttcactatctacatttctatagtatgtctagcacctaccaaaaaaatgcatctaataatctctcattttctccatgatacccactccccttcagaatctctctttcgtttgatctgccccataaaccaagctgggactcctccattcttcttagttataagtaagggtaatagcacatttttttttttttttttaagaatagcaaggcataaattacaaacaagattgacaccagctcaaaaacatatggctgtaaatgaagagggttatactttttttcaggttaattccactttcaaagacttctgcttatttttatgttcagtaattcccagaaaaagggggtagttttcctgaaacataacaatataaactggattttgaaaatgaacttagttttattagctcagtggtagagcatttgcctagcatgggaaagactcaaagttcagtgcctagcattgccaaaaaccgaagcaaaactttaattttcctacttttgcttcttaatagaagaattaaggaatattagaacacccaccacttttttttgttattgttgctgtattgttttcttaaactaactgtctccaaagaatgatgctctttaagtctacccctgctctccttttttaatgcgtatgcaatctcaggtgtaatcctcagaaacaccatcttcctcatctgagacagggtatctcactggcctgatcagttaacactgactggctggacaataagccccaggggcaatcctgtttctgcctttctaggacagggttttatgttccgagaactgaacttgggtccccacgattgccaggcaaacattttactgactaagctgtatcaccagtcctgagtcagctttgtattacagctcttgttaggttatatccatagttaggcatgaaaatctgtttcttttcctctcttcccaactctctccctctctccctccttccatcaggggtgggggtagggtgatagttcaagacagggtctctgtttaatcttgttttgaagaccagctggccttgaattcacagagatctacctgcctctgcctcctgaatgctggaagtctttttcttctcaaataaaaacataacacaaataggcaagtgtggggacttgctaaggataatgtaaactgttagcaaaataaatctttgacatttagagagggaaaatacagaaatgcacaaaaaaagcaaagatatgaaaccatttaaaaataagccccaggggctagagattaaagactattggctgcttttgcagaggagctggaatcagcattcacttggtggcttctaaccaccaaacttcagcttcaggggatctaatgcccctttgtgtctccttgggcagcgggcatacacagcatatacatgcatgcaggcgaaacactcatacacataaaaaacaacccacacacccaccaaccaaccagagagctggatgctgtggttcacagctatgacggcagcactttgggaaggatgagcctggggaactatcatgagttccaggccaggatgagatactgagtgagaacttgtgtcaagtacccatctcctcccacccccatccccccaaaaaacatcttgaaatcatagtttataatcacaacagtaaacgtatgttgttcttaaaacagtccttacccaactttggaaaaactattaggtattcagcattgcactgaggacatgccactctggctgtgctgtttcctctctgcttttcatccacccagcgttgtagacaagcctgatgaacccacttagtagatcctctgcatctgcatggtctcacccactcagctgttctatcatcttcatcggtggcaaaacacacccagcaacttctgtaaattgagagagaaatgtttacctctagggttccagacttctgcatgtgaagctcttagctaatgggatgtaattattatgtggtattgtagaaatcctgtgtttcattaaaagaatacagagcccaaagaaccaatctattcccagtagagcatttcttcactttctttctttaaatctttcactacagaatctattttctaaaccttgtttttatttttatttatttattttttttggtttttccgagacatggtttctctgtgtagctttggagcctatcctggcactcgctctggagaccaggctggcctcgaactcacagagatccacctgcctctacctcctgagtgctgggattaaaggcgtgcgtcaccaacgcccggcttaaaccttgtttttaatgcatcttttttcatattcatctttctagtaattctccctgactagttaggagactgatttagaagattgaaatagttttcaagtatcttaggttttataagccctcatgcatgaacttagaaaaaaaataaagtattagtgatttcatatacagttcccctcacgtctcaacccaggaacataaacacatttacgtagaatgttctgagccacattcaatattcaatagtcaactgaggaaaaacaattttttaaaagttcacttatttctcttcatggtaaagtatagctataggaagagaaaggaatattacaacttttctgtctcttatgtttttcttgagacagtgtctcacatgttgtaggttggccttgaattctcaatcctcttgcctcaaacatctcaagtgctacgtataggttcataccatcatagcctgctcaacagtaacaactttaagtataaggtgttgagtgtagtcacttactcctacctatagagccagcactaaggaggtaaaggaagtaaaattctgaattaagtacagcctgaatgatacagcaacaccatcccatagactgagaggggaggtactgtagaatagtagttaaaaaaaatagcagttaaagatgtgttacatttgcttgtactgtggaatatttgtttaatgatgtaaaggcgggttacattcttttatgttgcatttgtttaactctgtgaagctgtgttactttgcctgtctaagacacacctaataaagagctgaatggccaatagctaggtaggaaagggataggcagagctgccaagcagacagaacaaatagaaggagaaaaagagaagagggaggaagaagaaaagaaggagagacaacaccaagagccagccacccagctacagagcaagccatggattaagaagaaaagatatatagaaatagaggaaggtaaaaggccagaggcaaagatagatgggataattaagaaaagctagtaagccacactgaggcatagtatttataagtaagaataagactcttgtttatttatttgggagctaggttgcaggccccccaagaacaaaaagccaaagagtaaaaaaacaaaacaaaacaaacaaacaaacaaacaaataaaacaacaacaacaacaacaacaaaaaaccttggagaagagaggtctactgtataaaataagagagaaatcacatacactgaagcatccagtcaaacaaggcctggaaagccctgagtgtctgtctcactttcctgctttctttatcccaagacatatgtctgcacatacataaagaatgtgggtacagtacgacatacaggaaagacaacacgaagggtaaatattaggggataaggaaggactgaacgcaagtaaccagcactgttttctagtttagtcatggaccaacccccagtggtatatagataagtgtatacatagtattcaaaagtgaaagtgtaaaatccaacacaaagcttcccagtatcagaatggttactctaactaaataaataattctattgagcagctaatttaaacacatttttctgattggacacagtggcaaatgtgttacacaagcccaagaagttggaggctaccctgaacagtacagcaggatccagtctctaaaactaccaccactaaactaaaacctttttgtctgagacaaggtctcattatgtggatgaggcccatctattctctggaatgaaagtattaaaggcatgttatcaccaagcctgggtactaaacacttttaagggcacttcacaaagtctaacttttctgcataattatattggatttccaattcttttttttcttcttctttttttctttttttcttttttgagacaatcttatgtagtctaggttagtttaaacactttgcagttgaggacaatattgaactttggttctgcctgacttcaccatacttaggttggggatgaattcaggctttgtgcatatttggcaaatcctctaccaattgagccacatccccagctctctatacaaatttaatactgatttaactcatagagaaccccatttcctccaccaaagttttgtaagtgggaacaacttccaattaaagcttgttatttactgtgcttttcacttagacaactggtttctatcagaaaaactggcttaatatgcatggtggaaaaggctgattgtatagtcatgtactacaaatgaatgcgttcccagccttttagaacatgactttaacacgaacttcaagtaaaaattttcaattaaatgggaaaaactggcaaaatacttcagtgggcaaaagatcctgcaacacagcttgaccacctgaccttggtatgtgggacacatgttgtgaaagaagggaactgacctctgacctccacatatgcaaagtaaatttgttttgttttgaactacggcttcccttgtagaacctcttaccgatacttagagaaacccacatccactctctcaaatatacttttctttagttaaacacctttttggggggtacggggtgggtttcaagacagggtttcactgtgtagccctggatgtcctgaacttactctatagaccaggctggcctcaaactcacggagatctgtctgcctctgcttcccgagtactggcattaaaggagtgcgctaccactgcccagctcacttctttgctcttaactcccatgctaactgaagccaatattaagatatctttaataaaatcttcaattctgcttcattaaaaaaaggttccatggtaaaatatacagatcatgaaacttatcaatttagccattttatgggtacaattcaattaaagtatattacattactgtggatattcacaggatgtctaacattccagcataaaactgcaattgctaagtatatgagcaaatagtgtagctgagatgttgttagtataaatatatatttaatacaacttgtaattttctaagtatatttgtctcctttcaagctggatatatattttgacaaaataatgtggggataatatctagaaattcctatgtatgtagtgatatattacttatgatttattaaagcttgcctgaggattcaaaaagcaaagttagctataagtcatagaagccaggcacgcacctttaagaccagcagccagaagctgggaggtggtggtacacaccttttaatcttagcactcagggttaagaggtagatggatctctgtgaattcaaggcttcccaggaacacatgagattgaagttactctaaaagagtaacagatcacaggcctttaatcccagcgctagccggctatagaagatagaagcagggtcttcagtagtcagtatcatgcattcattctccagccacactgaggagaggcagcagtctgaggcttggtgaagagctctaggatcagccctttcagcctgagctatagatgacagctagtggctggctgctttactttctgaatccctaggcaagctttaataaatcataaatgatatatcaccacatacgtaagttattctgaggacagaacatattcagaataattatcggtattaagtaagggatggaaatgtagttcagccttacaatgcttacctagcatgcatgaagctgtggcttcaagtcccagcactataaaaactgagtatcgtggaagcaagaatagttgtatttatattcctcataaattatatataaccttagattttgttcctcagtattttataataaaaatttcaagctttctaaaagaaaaaaactggaagggggcagaacaaatgtaagaactgggagatgaggaggagtgctgtggattcatgaaccacaggtagctgtgcttacctgtgtaagacctgcacaagatggggcctagcaacattacatcagagatggaggagggattcatgaagccccatgccccacccggtaactctggacattggctgctggaggagaagggagtaaatttagtggtgtagccactgataacttgcccacacgcctgtaaataacccagacccatgcttatgcaatcaatcctaattaaatacagtggaacacatacaagacatgaaaacaggacggtgactagggagggggatgagctagggtagtggagtggaaaaggagcaaaatacattttatatatacatttctgcaaagggcatccggaattcccaagtttctgtaaattcttcactagtactcactggcttataagcgaatctctaaagaatgtaagacaagccaggacaacatttaaacctaaggatttttttaaaagtcaccacgtgaaggtgaaagtggaatgccatcagagcaaacaactatgcaataccttctggagtcgatgtggcaggcagtaatctctctgggcacattttagcatgccacaccttagagtcaaataatgataaactctaaggaaaacctggtaagtgaccagactcccaaaccactggagaaaccaacaacttcattagttctgacaacagaacacctgctaagtcctgtcctaggatttagtataaaacatgagaattgccttctcgggtggagctttgtgtgacccccaccccccaatcctaacagttaatggctgctgaacagggtggccggtggtctatctggggctgcaagcaaccacaaacatgaatttgaacaactggtcagagaaagaagctggtgcctaggagagaaagtggatttagtctccaaaaagtcactggttggaatttaaacagcagagggcggtgcagttgacttctcaaagagttttacgggctggagacccccaagaaagggcaactggtcccagtacgagccaacacgtttctagaaactcaacgatcctcaagtgttcaatgttgcatgcatgtggctgtactccataacctctactccagtgtgaccgttaaggctcccttgtggatattctgaccttacggcttgggggcggggatgggatgggggttggaaggagaaccgaaactcaggcttttaaaaaagaatgcctatgcctgcattgtggagagaggcttaaaagtccaagggatcattgcccaggaagataatctagttcttcccagggcatagctgccaaacccttcacaacataccccggggggaggaggtggggaaaagaaactaattctatgggttaacaacagcgacccttcacctcaaaagacaggcttttcagaagaagaagacctcactcctttaagtttctaagtctaggacccagaccgttcgcccaatcttcccctcagtgccatctccaaactcggagcctctctcccggccccggggcagtggaactctcggcggacgccaggatccgcgctctcggggcctcgaggccagcatgggcaggcccaggacggaggccggcggttcccggcccagccctgctcgtacctgtccagcatctgttgaagggcttggtccggcatcttccgcggagccggcgagctcggccctcgcccgcagctccgctcagggccaggcccggggacaatagcactgagaggcggcggagtaggcctcagtcccgcggcgtccgcggccccgccacacagcctcccggcgcggctccgtgaggcccgccgcggcggtgcgcggccggcgggcgtccgcaggggcggcggggagcgagggggaggagcctggggccgggaggcggcggtcgcggcccgggttcctgccggtccgcccggggttccggtccatggaccgccggggcgccgagctgctgccggcggaggagctacctctgtgaggtaagagtcaccgcctccgtgcgcgccggggtcacgacgcaggggcggctcggagcagcctgggagatgtagtcctcggaccgtccccgctagaggctgcacagcccgctgggacccccgccgccgcgcccgccgccgcagggccggcgccctcccgtttccttcctccagggggaaaaatgtccttcgggccgctgtccgggaagcggcagcatgtggcgctccgctgtcagtagcaacaaggtcagcgccccttctccgcgtcttgccccctcagctctcgcgctcaggtgggacagagccaggtgaggggaggtggcttggagggccagtttctgggtcgggtccagcacgcccggccgcggtggcgggaggtcgggcgctcgggtcagcctcggccgcgtcagagcccatcttcggggtgggaccgggtgacttagtgcggggctgctccggaggggcgggcgggcggacgggtgggtaacgcgaccgttctcaccggtgtgcgtgagtgtgtgtgtgtgtgtgtgtgtgtgtgtgtgtgtgtgtgtgcgcgcgcgcgcgcgcgtgggtgcagtgtgtttgtgtgtgtgtgcgcgcgcgcgtgtgcgcgtgagtgcagtttgtgtgtgcgcgcgcgtgtgtgtgcgcgcgtgagtgcagtgtgtttgtgtgtgtgtgtgtgcgcgcgcgcctgtgcgcctgagtgtgcgcgtgggtgcagtgtgtgtgtgtgtgtgtgtgtgtgtgtgcgcgcgcgcgcgggtgtgcgcgtggtgcagtgtgtgtgtgcgcgcgcgtgtgtgcgcgtgagtgcagtgtgtgtgtgtgcgcgcgcgtgtgtgcgcgtgagtgcagtgtgtgtgtgtgtgtgtgtgtgtgtgtgtgtgtgtgtgtgtgtgtgcgcgcgcgcgagtgcgacgagaggatcgggcgtgggtggcgggtgcgagaggacccctctgcctgtccaggaaccttctccgaggtgctgcctgtcgcccatccttccagggctcgccggcagcccccaaaaggaacgaacgcgttggtgaataaacagcccttgcttgctcagctgtgggttgtcagggacgtttgtttctttctgcagctggtcaccgttaaccagttctagtttccttgacacttctaagcaggtggatcagggcgagggatcaaaaagggagaagtcacaaatcatccccccccacccccgtcttctctgacgccggagggatagccttgagggaggaaggagctgttgttgacttaaacaaatgcgtaatttgggcgacctgtggcgtttcttagtgctgtgattggtgggtgtttagtaatttttgtttacctgtgcttacattttgttacaaatatcgggcctctaaatgccagacttgggaaaccaggacagaagaattacctggaatttgaagctgcctggtctgtgtaacgaatcccagagcagccgggactatggtctttaaaaaacaaacccccagcaatcctataatcccagcattggagaggtggaggcaggaggagcaggaattcaaggtcaccctctactattagtgagttcaagtcagtttcaaaagaacaaacaaaaccctacatgtgaatgcctggcagatctgggaggttcttcacaagttcaaaaccagcctagattacagagacagaccctatttaaaacaaaaaccatcaaacccacttttgtttgttttagtttttctttggcaaggactatatcagcagcacaagtaagactcaacttctagagcctcctgcctaggcctccctattttggaattatagtcatagcccacctagctccaatgtgttttcaaaattctcatttaatgtagaattttacagtcagctcttatctgtttgaatcaaattttgctctctaaatatattcatactactgtgtacatggctgggataaataaaataaaacataagtttatttggcctacaatttctgaaatatgcattttatttttatttatttattcggagacatggtctcattatgcaacggggctagcctgaaattcattatgtatactaagttggccttgaactcacagaaatttgcctgcctctgtctcttgggattaaggctgtcccaacacacaaggttattttttaatttttttaaacatttttttgtgtggatgcatgtatgtgtccagaggcttcaggtcaactttgggtggtttcctctattgttcctctctgtatgtttttgagacccagtctctcattgaacccagagcttgttggtagcctaaactaagctggccagtgagcttcagggatctgcctatccttgtgtgtcatcatctttgtgtcccattacacaaaacccccaccctaccttcctgtgctagggttacagatgccacaggcacacctggcttttatgtgggtagcaggcatctgaactcaggctttcatgaaatattttaggatattataactaatattccttctcatgaaaagagaaatagacctacccttggaaggaaaatgagtagtttaatcggggtatctaatatttaactttttaaaaaattttgctttatgtactatgttatatgtaagcttacctctattgcgtgtttctcttttaagcagttaacattgttgaatatagattcacacaaaatttgtttagctttgtgatttatgctaaagagcattcccatttcttagaatttgttgttgttgctttgtgtcttatatactggtctggccttgaacataagccaagggtatgttgatactggttttcctgcacatctcccaaatgctaggtcaccagctgctatgaccagcttttctcttgttggtttgtttttagttaaacaattggtttagttaaacagttggtttctttttagttaaaaaattgatttatttttaatgtggatgagcatttgattttatatttgtgcactacatgcacaaagtgcccacagaaaccaggaaagggcatcagatctccggcacctggtgtcaccgatagttataagctaccatgtgggtgatgttagtcaaacctgggtcctctagatgagtaaaacagctgagccatttcttagcttctgttggtttgccaccccctctccttttaagataggatctcgatatgtagccctgactggcttctaactatgtagggcaggttggttttcctcttgccaaaactctcttgcctcatttccttacttttgggattaaaggtgtggttcaccatgcttttttttatttttttaaaggtttctcactctgtagtctaggctggtctccatagcccacaatgtcctttaactggtggcaatcttcttaacaagtgctaagatctacagggatgatccatcatgccatactttatttatttatttattatttatttatttgtttgagacagggtttctttgtgtagctttggagcctatcctggcactctctctgtagaccaggttggccttgaactcacagagatccacctgtctctgcctcccagtgctgggattaaaggtgtgcaccaccaccgcctgaccctaccctactttataatttatattttaccctaatttggaaatatgaatagttctattgataacaaatcccatttacattagcattactatttcaaaactggattttatgcaaataaataagtattttattaattaaatttattttacatcactaccaaagtttcccctctctcttctcctcccattccattctgccttatatttttagggaaagtcaacttcctgtctgtttcaaaaaccctcactcagtagtagggaacaaattctgttttggggactgtggatgtacaccagtaataaggcatttgtttagcatgtccaaggccctggactttgctccttagcaacactgagggaaagagaaaagaggaataataccctttgtgaaagacaggcgctcagtagtgtgactttgatccccaaaggttaagtgactggtaatgaatagcagcataggccagctttaggaactttgcccttaggagagatggaaactcatgtggagtagggtaggcctgacatgagaaagagacccattgtgtaggaaatggggttagtttataggtagagttttgtcctggaagttctggtcagtgtgtcctaactactgtctctgtttttacacagggtctccttatgtagggcaagctaggcttgattgacagatactcctgcctcaaccccccaactataagcgctaccttgcttgatttgcttctcctcaactctctccccccttttctttcctttctttctttctttttttttttttttttcccccctccgaggcagggtttctctatggcttttggaggttgtcctggaactagctcttgtagaccaggctggccttgaactcacagagatccacctgcctctacctcccaagtgctgggattaaaagcgtgtgctgccaccacccagctgttcttttcttttccttccttcccttccttcctcccttgcttcctccctttcttccttcctgcttatctgcctgcctttttttgttttgttttttgagacagggtttcactatgtagctctggatgtcctggaaactcactttcagcaacttagagaagaaagggtttatttcactcacagttccgtataacagttcatcatcaaaagcagtaaggacaggaactcacccagggcaggaacctggaggcaggagctgatgaagaggccatggagggggttgtgtcctgagttgtcttcatggcttgcttagcagacccaggaccatgggctgggctctcctccatcaatcattaagaaaagcctaccagctggatcttatggaggcatttcctcaattgagactcctcttctctgatgattccagcttgtgtcaatttgacatcaaattagccagtacagaaagaaatgaattacagggcagcatataatatttttccctactgtagcttatccctgcaatttcaattttatttagctattgtgtttttttttttttttttttttttttggagacagggtttctctgtataatagtcttggctgtcctggaattcactttgtaggccaggcctttaactcactgagatctgcctgcctctgcctcctgggtgctgggattaaaggtgtctgccaccacccaccactgccctgtttgccctatttactgtgatacttttagacagaacttttagacagaattttacttgtagtctatgttggcctgaaactcactgtgtagcccacactgtccttaaactttcagtggtccttttgcctcagtctcctttgtgtttgaattataggctggagtaccaattttatgagaaaatatacatggaaaacaattttccttttaaaacagccacatgtttcatagagccactcaaaatgtggtcctgtagaccctaaagttccccagaccttttccagagaatgtgtgaagtcaaggctattttcataataataggaaaacatcatttgcattttccactgcattaacgtttacactggcataaacagctacagataaaaataccttgctcattagcatttgtcaaagcattggacccatacagcactaatgatcatatatttaccacagtgggtatgcattaaacattagaaccaaacaatttttttactgttcaaattaagcagatttgctagtctgtggtggcccacaaatctttaatcccagtacttgggatgcagaggcaggtgaatctctgtgagttcgaggccagtctggtctatagagcgagtgccagggctacacagtgttagtctttacacttgaatattcatagttctagtctctgtatgttggaatgggtgtgatacattcttctcctgcgtctacagcatgatagccagggacaggggcatccacttagtccaccttgtcccaatggcaagggagattgaagtaggaatattgcttgaatgaacgaaaaggtttgcacccagccagaagtagtgggccagaactgggaattctagcactcaggaggccgaaccaggatggttgctagttctagatcagcctgggctacataacaacattctattgggaaaaaaaaaaaaaaaagatcagtaataaacacaaatagcaaagcaaatgaagagatgtttattgtttttcattagcctatataccatttggattaaagtgttttttgttttctttcatctggaatccttagaacccttaggctccaggagtttagtttgttctgggtgttgagcctttgagccagtgagctctcttagtacctaggctttgttttaatgtgtacatttgcttgtgttttagtttcttccctcctgggaagttcttgactgagtttgtggctcctgtaatttacttttgaggtttgctatttccaaccctctgttaatgttacaccctcacagacatttagagtggccccattcacaaaggcagctagatttattgctgaaagaattaaagatgcccgtgaacgtgaaattggaggtgccatggagaagtgaaaatagactattaatgggagaagattgagttaagaagaacatagactgcagctacatgccacccagaattcaaacaatttggagatcatttgctgaaatattagaaaaatcaagcgatattctggtattttttgttgttgttgttattgttgttttgagacagggtttctctgtgtagctttgtagaccaagctgacctcgaactcacagagatctgcctgcttctgcctcccgagtgctgggattaaaggtgtgtgccaccaccactgcccggttatttggggaatgttttttaaagcaagcattaaacattatatgtggactggcaagatggctgcctgggtcaatgcacttgccaccaagcctgacaacccgagtccccttcctagaagttacattgtggaaggagagaactgagtcctgcaccttgtcttctgacctccacatgtgcacctcggtgcacacaaagtcataaataatttttttaatgtatgctctggaaaccaaataaaatttactaatttgttattttcagtcccattttgctattgagggggagcccacaattaggagtaggagggcttgtctgtctatctatctgtctgtctctgtcttcctccctctcttgttttctgtatatgtgagttttgcctgcatgtatgtctgtgcattatgtctgtgcagtgctttaggaggccagaagagggcattgaatcctggagttacatatggttgttagccaccaagtgggtgctggaaacccaacctaggtcctctgcaagagaggtaaatgctcctgagccatctctccagccctgaagggttcatctttaacctgctaggtgtatctataaaaacaaaacaaaaacaaaaacaaataaaccacatagccaatctcatgccaaatggtgaaaaattgaatttttcccacagagataaaacaaggatgtatgctcttgaaacctttaatcaacactgtgccagaggctctagtcaggtcaattaggtaagaaaagaaataacatgtatctgtgctggtcagttattgtcaacttgatacagagtcacttgggaacagcaagcctcaactgagggaactggtctgtggggcatttttcctactgccaattgatgtgggagagttcactgtgggtagtgtcaccccgatagttgggcatggattgtataagaaagcgggttgaaagctgggcattggtggcgcacgcctttaatcccagcactcaagaggcagaggcagatctctgtgagttcaaggccagcctggtctccagagtgagtgccaggataggctccaaagctacacagagaaaccctgtctggaaaaaccaaaaagaaaaaaaagaaagaaagaaagaaagaaagaaagaaagaaagaaagaaagaaagcagattgagcaggccatagagagcaagccagtaagcagcattcttctatgatctttgcttcagttcctgcctccagggattgcttgtgtttgaattcctgtcttgacatctctcaaatgatggattataacatgtaaggtgaaatactttcctccccaagttgcttctgatcatggtgtttgtgacagtgacagaagcacagtaggacagaaattggtgctgagacagacctgactacgttgtttttggggatgattgaggaagaatttgaagctttgggctagaaaaggccattgaattatcgaaacttaatgagctgttatgggagcttggaagataggaatgttgagagaggtacaggtaaggtaaggtacagataaggggggctggcttgtgaggattcagagcaaagcaagccagtgagcagcttccctccatgcttcctgtgtctcctcttgtttgacttcccttaatgacgacagtgattgggatatggaagtcaaataaacttccccaagttgccgttggtcaatattttatcgtagcagcagattaacaactaacacagcatccatattggaagggaagaagaaaaactattttatttgctgatgaaatgatcttatgcttagaaaattccaatgcagtgactctcctttgagtatgtcttacttcctgctgctctctgttagggtaagcacacacccatgcccctcctatgggatgtatctttctttctggaaacccctctctctcttagcctttgtgtttaaaatgtgtgttaaaacaccgttagtgagacctggtgtggcagtgttcaggaaacagaggcaggtaggcttctgtgagttcaaggctggcctggtctatgtatatgtatatcctatctcaaaacaaaacaccatgaaaaccattttaatgataaaaatttcaaggaatcacacaaaacaaatgttagaaccaaaatgcaatttaaacaaagttataggatataatagaagtatggaagatttactgtatttaatgtactatatgtacactaacagtggctgacctgggaatagtagcaagagaaggtaatttcatttacagaaacatcaaaaggatcaaaataggtctggggatgtagctcaattggtaaaatactttcctaacattgcagtaccatgggttcatttcccagtaccacataaacgtggtgtggtagtgaatgctggtaatcccagcattggggaattgatgctggaagaagttcagggttagcctcaactacatagtacgctcaaggttgggttgggctacatgagatcctgtctcagaaaaataacattgggctggcaagatggctcagtgggtagaagcactagctatacaggccgatgagtttaatccctggattctatggtggaaggagagaaccaagtttttagttgggttttttttttccaaaattgttttctttccttccttccttccttccttccttccttccttccttccttccttccttttttctttcttttgttctttcttttcttttcttctttctttttcttttttcttttatttatttatttattttttggttttttgagatagggtttctcagtagctgtagagccagtcctggaactcaatctgtagaccaggccggccttgaactcacagaaatccacctgcctgtatctcccaagtgctgggatcaaaggtgagaaccaagtttttaaaagtttttaaatggtgctccatatgagcaccattgattcattctcatatacctcaaatgtacatacaatgaggatgataaaatacaaatataaaaaaacacaaagtagggctggagagatggctcagaggttaagagggccgactgctcttccagaggtcctgcgttcaattcctagcaaccacatggtggctcacaaccatctgttatgagatctggtgccctcttctggtgtgcagatatacctggaagaagaatgttgtatacataataaataaaatcttaaaaaaaaaaacaaaacacaaagtaatcaatttaacaaaagaagcaaataacatctgaaaactaagaaattaaagatccagtaattggagttcataagactgtgtatgtatgtatgtatgtatgtatatatgtatgtatgtatgtatctctatctatctaaatctgcttaatattttaaagctagcgatactcccttaactgatttataattcagggcaattaccatccaaatttcatcttgtagaaagtgacaaattgaagccgggcggtggtggtgcacgcctttaatcccagaactcaggaggcagaggcaggcggatctctgtgagttcgagaccagcctggtctacaagagctagtaccaggacagcctccaaagccacagagaaaccctgtctcggaaaaaaaaaaaaaaaaaaaaaaaaaaaaaaaaaaaaaaaaaaaaaaaaagaaagtgacaaattgatccaaagggtctaatagaaatttttttgatctagaagagccaaaggattcctatgaaccagtgctgacagagatgactcagtgggtaaatgtgcttgctgttaattctttttttctttttttcaagattttatttatttattatgtatacaacattctgcttccatgtatatctgcacaccagaagagggcaccagatctcataacggatggctgtgagccaccatgtggttgctgggaattgaactcaggacctctggaagagcagtcagtgttcttaacctctgagccatctctccagccctctgttaattcttactacccgagtttgatctccagaacctacttggagggagagatccaatttctcagagttgcctgtcacacatatatcctggcacacttgtgccgtcaattgcaaaaatcaataaatgtaaaagataaattaaaaaggaagaaccaagttagagaattcacatctctgagttaaaaagtgcctttatttctttatcgtggtgcttgggattgaatccagggctgtgtgcatattaggcaacatcctactgctgagctgcatcttcagcctcactgactgatctcatttgtttgtttaagacgaaattcctgaccaggaactctcctctatttggcttccaactctgtgtagccaaggatgactttaaacttctgatcttattgcttccaccttgagtctgatactgcaggccgttgctactacagccagtttatttgattatgggtattgaagccagagctgtgtgcatgcaaggcactctatgaactgacctacgtccccatcccatattttctatttttattttataacttaaaaacatattatagcttatttactctgtgtgtgtgtttgtggtggggtggggtgcaacctgtatggaggtcagaggacaacttttaaaagttggttctctcctttggtgatgtggatcctagaaatcccaaactcaggttatcaaacttggcagcaattgcctttacctgctgagtcatcttcttggcacccatttcctaattttaaaattcactaaaatgttacattaatcaaggtagtgtgatagcagctgggtggctcacacgcctttaatcccagcactcaggaggcagaggcaggcggatctctgtgagttcgaggccagtctggtctatagagcgagtgccaggataggctccaaagctacagagaaaccctgtctcaaaaaaccaaaaagaaaaaaaaaatgtggtagcagtataaaggtagacatttagattagtgggccaggaagtctataaataggttctgacttcatgatggtcagtttatttacaacaaggacaccaaaataatgtaataggggaatgtatgtatttccgtcacaactggataaccatatggaaacctcacaccatgaacaaaaatgaactaaacccaaatgtaagagctgaaactataacattcttagaagaaagcataagcataaatgctcggattaggctgttttcttacctgtgacaacagcaccagtgacagaagaaaggacaaattggacttaatcaaaatgaacagctcttatgctggaaaggaggtgttttagtctattttttgtggctaggagggatacctgagagagcccagatgtaatccatggctgtgatcccagtactcgggacatagaggaagaagatcaagtattcagctatggatcatcatacctagccttgtagtggttcatttttttttaaggtttattttgtgtacatacctgttttgcctgtagatgtaggtatgtgtaccacgggtgtgcctagtgcacacagaaatcagaagagcattggatccccttgaactggagttacagatgtttgtgagtcatcatggtgctgggaatcaaaccttgggtcctctgcaagagctgctcactgctgagctatctctatagcccctatttttttgttttttgttttttgttttaaagagtattttgatagttgatgctttttttttttttttcttggtttttcaagacagggtttctctgtaggtttggagactgtcctggaattccttttgaagaccaggctggcctcaaactcatagatctgccttcctctgcctccccagtgctgggatttaaaggtgtgggcctccaccacctggagatagttgatactttattgactcaacattttcagtaatagtaattgtaacaataccttactatatacatagaatgcttaagaaacaatgtatattcttacagttttatccttagagctgtaatttaggagaccagtcttctaaaatcctaaacagatttttaaggttagacacaacagagtaaccttaccatttgatcttcagcctgaataactttgagagtgaataagagtgtcatttagtatgccagtttaacagcacaaataaactctactggaaaagtcagtggatagttagcctgtcagtaactgacaaagggtgtctggttctcgtgactgttccttgtaccacagtgtgtcatggaatatagtttgtttcttccaattgttaaaaatccaccaggagattacaattccaaacatacacacatcaaaaaaatccataaaaccaatattactataggttaggccactgattaatcccagcacaataattatatgtgattttaatactctcctttctccaatggacatgtcttccagacaaaacaaaataaaaacataaaactccaggtggatctctgtgagtttgagaccagcctggtctacaagagctagttccaggacagcctccaaagccacagagaaaccctgtctcgaaaaacaaaacaaaaaactccaaaacaaaacaaaaacccagaaatatcagattgaaatggcattgtagatcccaaagccctgacagatgctggcagtaaattccaccctagcatcacagaatataccttctttccagtcttccacgaggtctctttaaaatggacttgtgatgttattttgaagctctcaagctttgaagaggtagatcctgcctggtggaagtagttcactgggggcaaatggtccagtgaagatgattcctgctcttgcttctgactgtagtctctgcttcccgtcgtctactatgtgaggtgttttgccatgaactctgctatgccttccctgccacgactgactaacactgatgaaaatatgagccaagtaaatctttcctccacgaagtggtttccttcaggttattttggtcacaatgatgcagaagaaactaacacagaaaattggccagtcaataactgtgactaaccctgaccacgtggttcataagcctttgggattgtttgtttttgaacagtttggtgattcaggctagagaagccctagaatgatataagagcttaataggcctctatcttcggagagtgctttagacagaggaatctcagagcagtgaagataagcttggtgtatccaataaaggcaacaaggccctttgggagaaatgttgagtcctaactgcaacaggaaaagtacctgcgcctggaatatccagttccaaagggaagttgttcaggttggttgtatttgacatacatccgtaagccccaagtctaggaaggacgattctaaggacagcttgagctatatagtgagtttaagaccatggatacacaggaaagagaagtattcaaaaagagatgggggtaggctggcaagatgggtcagagttgccaagcctgacaactgagttccgtcctcaggaaccatgatgagaaaggagaggacctagtcacccaagtttgttctttgactttaatgtgcatgcccaggcatgtttgtgcccatctctactgaaaataatatgtttaataatatctttaaaacaggcgtgatggcacttacctataatttcagcactggaatagtagaggcaggaggatcaggaattcaaggaccgtttcaattatatagtgagtttgtggctacctgagactctatatcaaataaaaagcaaaacaaaacactccacctattttaaatgtcttgatatactaaaatatatatttggctcttgtatctgctaggacagtgctgtactactgggctatgcccccagccccacttgattttatttaataattcatttgtaaactgggtggtggtggcacatgcttttaaactcagcacttgggaggcagagacaggtggatctcagtgagtttgaggccattctggtctacaaagtgagttcaaggacaggctccaaaagctacagagaaaccctgtctctaacccccccccccaaaaaaaaaaaaagaaagaaagaaagaaaaagaaaagaaaaaacagaaagtgtgtgtgtgtgtgtgtgtgtgtgtgtgtggtgacatatgtacatgtttggacaggtgaccgagcaggccagaggcataggatcctctggagctggagttactcatcaggacatgggattcaccaattagactaggccagcaagccccaggaatcgtcccatctttgctaccccagcaagggttctacaaacatgcctcattttttaaagtgggtattttgaacagagaaacaagtgatcttaaccgttgagccatgtcttcagcatctatttatcatttcttagtctgagtttccttaaaataagccaaacaaacaaacaaatggcagggggtggggagctgtctcacaaagtaaaggcacttgctgctaaccctgatgatctgagttcagtccttaggagggagagaactagcacttcccgccctccacacacacacacactataaataaataataaataaatgtaaaaaaaaaaaagaagaaaacccaagcaaaagaatgatagttttgttatttagggttttgtaaaatcaagtccttaaggcagcggttctcaaccttcctaatgctgcactcctttaatacagttcctcatgtggtgacccccaactataaaattattttaattgctatttcataactgtgctactgttacaaattgtaatgcaaccataattggtgatagaggtttgccaaagggtcgtcacctacaagttgagaaccactaccctaaggcataagaattttttttgtttgttcatttgagacagggtttctctgcatagctctggctgtcctggaactcgctctgtagaccagactggccttaaactcatagatctgccagcctctgcctccccagtgctgggtttaaattcttacatagaaattcttacatagttctgaatgttaactagtataaacatcattaacagatgatgacgaaattctcagtacatgacagtttaaaactaataaacaaacaaaaaaagaaactattaaaaatatctgcatactgtggtggttgtagtcagacctcactgtactctgcctccagaagtaggaaatataggtctgtaggaagaagcaggagaagaactatctggagccagatgtggtggtgcatgtttttaattctagaactcgggggcggaggcagatgggtccctgtgagtctaaggccagataatactacataataggtctcaacaaacaaacaaacaaacaaacaaaacggtctgtctggtaagatcctattcctctattaggctgactcacttgacgcctggtattagtgttaaacagccatgagacataggctattctcagtatagaattcctagttagttgagctgcctctcaggattaattttggattgcgtattttaacctttaccattttagtttggtggcacatgtctttaatcccagcactcgggaggcagaggcaggcagatctctgtgagttcaaggccagcctggtctccagagcgagtgccaggataggccccaaagctacacagagaaaccctgtctcgaaaaacaaaaacaaaaaaagtgctttcatacaaactaacataattttggatattgagatgcagcagttaaaatcgtccccattttattctagaggaagctaagaatctaagaacgtgggttttatgtgcatattgtctacgtataagtcccaaagttataatctgtggctggcctggttgcataggctggttatcaaagccatttgggaagctgaggcaagaccacaagttcaaggcccacactggtctacagagtgaattcaaggccaacctgagctggcctcaaattcctgggctaaagtattcttcctttatcagtcctttagtacttgggaatacagggcacacaattgctcctagatatttttgttgtgagagagggcagtgggctgggtagtaagagtactgcctgtggcctgaatacttgttactgttattacttaggaccaggcaagtggtagtgggagtaactatgcttagacatcagatgtagatatagatatattttattaatttatttttgagacagggtctcatttagctcaaagttgtctcaaactcactatgtagccaacgctggccttgaactcctgatccttctgtgtcagcctcctaagtgctggtattccaggcatgtgctactatgcttggtgacaactaaatttggcaagcccatgccctgtccacatgtcatttcttacaatattaaattgatcccctgctactgcgatgatgcaattttctgttagcattttggcaggtagtcttttttctgaaagtattagcagaggcagttgttgtacttgtttgtttctcagattccacaggaaaatatcagtcatagattccagggaggtggcatatgcttgcagtcccagcactcaggtggctgaggcaggaggcttgtgaatttgaggctagtttgggtcatataggataatatagtctcaaacaacagcagcagcaacaacaaaaaagtgaaaaaacacctccggattttggcttatggggttaaagcaagaccctaaggaagccagtgttcaataatagaagataaagtcagtctacattaaattgaactactaaatgagttatagtgtgaatagcaacaacaacctgataggtggtacacacatgtaagctcagtagtcaggagtaggctgaggtaggtagatctctgttagttagttcaaggctagtctggtctgtatattgagactctatctcaaaacaaacaaaattcacaggtgagctaagagaattgaattatcatctcttcttggatctagccccttctataagctggagattaaacacagggtctcgaaacacattagggaaatgctctattactgagctataccccagccccagatgtacagtgtaggaattgtgtttcatgttatttctgagcttaaacttgacttttcccatggtggggagtgatgtggtcatacatcccagttgtggattgtccttttaggatgtacctctacaataaggttcatgcccttggtgagagtagggggctggatttcagtctgtacgctcgctttctggtgctgagtggtatgtctacaacctgtgaaagaacttgagggttccatgctgtttatttactacacaagctgttagcttcaagtcagttaatacaagggaaggaatttggtacaccccactttcctgtgtgagaaaggtactgagtctatacatacactacttagcttcaaatgagaggatccaagggctacctggacagagacaccaaccttgtccttgttgtgacaattcctatgactcatcagattgtatagaacctgctaattgccggctgctaatgcagagattgtagcaaagaagtttccttctttacctctcgtctgggctagcatttcctttcaatatattaagtaaatcagttttctttttacttttagacacggtctcatgtgtcccaggttggccttgagctcactagaactgaagatgaccttgaactccagatcctcctgcctccactatctattggtggaattatcaggatgtgccactgcactggtctttgatgagtcatcttctggaagacagttatgcttattttaggacacccagagagagactctcttgcccatgggtagcatctggctaaagcttatctctggttttcaggcaaagggcacccatacagaagttgctaaaccaccctttgccttctttccacacctttgaagcacaaactgtttctgtggctgtgtggattggggagaaaaggacctgtttgtatgagtcactaaacaaaagagagggctggcatcaacctgaaattaggtccttgctttgccaatagtttgtgagtagggaaatcaccttcattgcctcttttacttctgctgttaaagatagtaatagtatttaacagtttattgcatgggccaaatgaaatgaattaaaacagatgtggtgctacactcctgcaatcccaaccttcagaaggctgaggcaggagaatgaggagatcaagcctagcttggactacacaggaaatcccaggccatctaaactacatagtaaaagctagtctcaaaaataaagtaaaaaacaaagaagaaaacaaattttgtttctcctgatccttttgcctctacctgctgactgtttagatttctggcttttgccactatgcctgaatatttttgtctggttttgtaaaaaaaattaatgtgtatgtgggtatatatcactttgtgtgtgtgtgtgtgtgtggggggggccgtgttacctgcaaaggccagaaaagagagtcagattccctggagctggagttccgggcagttgtgagcttcctgatataagattcaagaacctgaatttaggttctcttaatctctgagccatttctccagcccatttgtctggttttgagacagtgcctgagaactatgatgagaataagacaatgaaaaaaccaggctggagagagttaagggaacttgcttttgttgcagaggactggggttctgttaccagcacccatatcaggcagtccacaaccatctataactccagttctaggagagccattgccctctcttggcaccctcaggtcccaggcacttaagtggtacacgtgtatatgagtgaaaatttaccccagcactcaggaggcagaggcaggcagatctctgtgagttggagaccaacctggtctacaagaggtcagcctccaaagccacagaggaaccttgtctcgggggaaaaaaaagtgaaaatttaaatgctgatgtaacttcacatttttatagattttattttttacatttatttatttgtgtgtgtgtgtgtgtgtgtgtgtgtgtgtatgtgtaagagagatgggggagacttgtggaagttggttctctccttgatcaagtgagttccagggattgaactcatgtcatcaagctaggtagcaagtttacctgctaagtcatctcctggctccacaatttaaaaaaataaaacaaatggggctggaaatcaaactcaggaccttgatcatgctaggggagtgctctacctttaaactgtacccttatcctcctcacaaaactttactgaataaactgtatgtaaaaatatctaataccttgagctttttttttcttcttcttcttctttttttaagcctcaaaatgaatacaagggattcatccttaggggtagaacacttaccgagcttgtataaggcccttgactcaagctccagtatggcataagaaaagagtttaaaaaaaagatgagggctgggtatatggctcagtgttgctgagtagttgctgttcaagtgtgagggcttgagtacaaatctctagaactcacataaaagcctggttatgcttgtctgatttgcatttgtaatcccagtgctactagggtacagtaagagcagcagtccccagagcttgtgggggctaatcaggtatacacagtggcaaatggagagatccttccttgaacagggtcagaaataaggacctgggttggcctctgatctccacacaccatggcatgtatagctgcttcattcacacagaacacctcctcttacggtggttcacaagagtctgtaagtacggaagtctgcaattgcagttctaggggagccagtgccctcttctggcctctgagggtgcacaggcatacattcagctaaaacatctatacacataaaatagtaaaatattaatagaaacattaaaaaaaaaagacagacctggtacacaacttattaccagcactggggtggcagaagcaagtagatctctgtgagttcaaagccagtctgatctaaagtagtgagtttcaggccagccagtgagaagcgctctctctctctctctctctctctctctctctctctctctctctctctgtgtgtatgtgtgtgtgtatgtatgtatgtatgtatgtatgtatgtatgtgtgtatgatgaaagtgacttaatattatttggcatgtcatgagaagactttctacactttttggttaatgtccaatcaaggactgtattattctttgttctatatactgttcatccactatctttatatttcatctcatttatttttatttgtaagttagcaaacaaagcagtagactttattgtggaattttcatacatgtgtgtggttatgctttgctccaacttgtccctctcctccatcatttttgctttattttgaaattgggtcttagtagtcctggtggccttgaactcatagctgaggttgtcctttgaactcctggtccttttgctcccctctcaagtattggaactacaggcatgtgccaccatacctggctcattttcatttttcagatgctctctctggtagaagtcagtggcaacatttcttcaggaatctgttaacacatcgaaaccttaatgctctgcctcttaaatgattaatttcttctttagaaatatgtttcaaggaacaattgatttggaaaatagtaaaatcctagaaataaatatcctacaacaggagaaaggttagattaattatagtaaacactatgttatgctcattaaacatagtagggattgttttggttttttttgagatagatttctctgtataacagcactggctgtcctggaacttgctctgtagaccaagctggccttgaactcacagagatttgactgcctctacctcccaagtgttgggattaaagatgtacagcattactgcctggctctaaacatagtagttttgaaatagctgtaatggtaagagtttgtcttcatgtaatgttaatttaaaaaaaaaatctctcagcctttgtgaggcaaaacatactttgttctttgattagtcaacaaacccttgcctaacacctccacagtgcctaggttacagtgactcctttacccagaacagaaatgtaagcaaaggatggagagtgctgtcctcgaagttatacctgtgctccagggactggggcaattttgctcacatggttagtgaacgagtcacagaacagacgtgagtagaagcagattatcaaaaggtagataggtattccaggctaaaggtagggacaaggtgaccgagctgccaaggttagcatggatggctgggaagaaaagtaggagaatatatcttattctttcaacaagaggacagagtgtcattgaaagccataccatggaaaatccatatgtaaaagatgattcaagatttaagtatggaagccacatactatatgatatatatatataattgtagatagtgaagggacaggattatattggctgaaaatgaagaggaagggatgcaagcagaaatttaggaggcagaatgaacaagttttagtgaccagttagactcagtgagaacgaagaggaaggacagaatcctgtccatattctttttttgttttgttttgttttttgagacagagtttctctgtgtagctttgaagcctgtcctggaactcactctgtagaccaggctggccttgaactcacagaaatccactttcctctacctcctttagtgctgtgattaaaggccaggccttgcctagattcttaacctggagggatgagactgagggcgttgccattaaacaaataggccaatcagctaccttccatagctggcaccagtccggcctttcctcagaacaaacacacatgccatacccaaaccaaacctaaacaaaacctgtttactttttagtattagagtgaaaacccacataatggaagaatatatacaaagtcaatatcttatctaccactgtgatattccagccaacggcttattaccagaacccataaagtattatacaaaccaagggtagacaccaggaagagagggggccaagagactcatttaaaggacaaaattatataagctgttctacctcactaagaagagaggcaatacagatgtcttctgaagatttagaaaatcgggtattttgccaccactttgtacaataccctcaaggtttccttaattctacaccctttcttaggcaatgatacatcctcagaacttgccatgatccatttccagatcaaatgcttttcctgaactctataactcctgtttacctagcaatttctctgagggtccctcaccatccacctctcttgcttccacttgggactgtaagcaaaggtccagtggcaaacatatttttttcccctcccaaacaaggtttttctgtgtaacagcctgagcatcctgtaactctctctatagaccaggttaacctcctcctgcctcccgtgtgctgggattaaaggtgtacactatcgctgcccagctaaacatatttttaattagttcagtttgttattttcatttatggttagtgtttttgtggtttgttttaaggaattgatgggactggaggtgtagctcagtggtcagaatatgtgcttaatgtgtgtgggtcatggattcaatcctcattgcttaaacaagtaatctgttgtttagcttaatgcagtgaagatactcctaggtccccctccccctttggtactgggaaatccatcccagggccttgcatgtatgaggcaaacactgcaccactaaaaatacactgtcaattctggatatgtttctaaactttaatacttaaaaattagtatatattcattgtgcaaaacatcgggctttattgtaccattttaatatacatgtgtcacgtactttgactacttacataccctttcttgttccttttcctctcgggccacttcctttcctgggtggtccccttcacattggggtcatattttttgtttttgtttaattttctcttgtttttttgagacagggtctcatgtagcccaagctgtccaggaacttaatataaagctaaggatggccttgaacatctgatcctctttttcttcttctttttttaacattgctttcaactcctaggtgttggggattataggcttgtgactgactatggtaggcacctgatgtaattgtccttctaaatgaagtatagtttatagtaggatcttggctgttttaggtaaaaagaaaagataccttggggtggtcggtggtggtgcacgcttttaattctagtacttgggaggcagaaaaaggccggtctttgtgagtttgaggccttaatatttggaaggcagctgtgttcaccactatattgccagtgctgttgctagatacttgagaagctcaggcaggaggattacttgagcccataaatttgagactaacctgaacaacataatgagacatctcaaaagaaagaaagaaagaataagtgtacatatagaaaacctacatgcctacgtgctgtgtttataagcagtatcatagaggtgatgataacgaaggagaaaatcaccccaaaaaaggtgtgtacatgagctgggtgtggtgactcttgcctaggaggcggaagctgaaggacttaaattccaggacagcctgggctacagagcacacctgtctttaaaaaaaaaaaaaaaattcatttggctattttggttaaatacaaaatgaagtgctaagaaggtgattctgcctgtgaccctggagtttaggaggcagagatggggtttggaccaagcaggcttgttggactagcagaatcttaggttcaagagtgagactagagaccagagactctgcctcaatataaaatggagaacagcaacaacaacaaaaaacaatagaaggaaggacagaagaaaaaataactacaaaggctactaaaagatgcaaatttgtagtttctgataactttccttctgacttgtaagaaagggaaacagaaaattaagacagttgtaaatgatgcttagcattttctgttctaagttcaatcagcatagtcatcagctgacatttactctgaaccccatgggtgaatagcatggaaccagatcccacaagaaatagtatcttctgcctacgtgagcaaacttagctcttgagttattgctttcaggagctatacataatgacagttgatgttaatagttgtgagatcagtctgaaatcattatgttaaaataggtagggacaatcatataccacttttaataatacagagtaattgaaggttgtgtgtggtagtacctataatcccaccacttgggaggaaggttgtgtgtggtagtacctataatcccaccacttgggaggtagagacagaaggatcaggagttcaagagcatcctcagctagatagcaagttcaaggatagtctgggctaaatgacttcctgtttcaaaaacaaccaaaaatgtctctctctctctgtctgtgtgtatgtgtgtatacatacatacttacatacacacatacatacatatatacatacttgtttcaagacagggtttctctctctaacagttctggctgtccctggaattcactttgtagaccaggctggccttgaattcactgctattgacctgcctctgcctctgcctctcaagtgctgggattaaagccatgcaccactactgccaggctctgaatatattttttatcttgaacaaggaagtcattgtccaatgtagttatactcctaaggttttaagttatttaccaattaatctctctctctctctctctgtttttttttttttttttttgtgtgtttttttttttttttttttttttttctgagacagggtttctttgtgtagctttggaacctatcctggcacttgatttgtagaccaggcctgcctctgccttccgagtactgggattaaaggcgttcgccaccaaagcccggcctactaattaatatcttattattttacagtgaaggaatttaattttatttgatcactatatcaataatgcaaggtagactttcattttatcagattaaaaattaggagttgactctgaacatacaggcagaattttttgcatgggtgtatttgcatgggtcagtttgtgtcttggtggggggttgtgcatgtgtgaataaggacaagcagaagccagagtcaaattcaggtgtccttcctcaggagcaatctgttacttttttttcctgggaccgagatgggggagggcacgatgtagtcagtggccctgggctgtggtcaaaatggaaagatggagaagcaaagagcatacagtatctagttattgcaggcagtctcccatacaagtactaattaggctctacttcattcagaagaaatatatggaagatgtggtgatatagccataaactttttttttaaattgattcattgcaggtttacatcatgcataacgatgggatcatctcccagttccttcacatctgcccaccacccttgcaacctccttttcgtttctttaagactgtctctcgatgggtgttggtggcacacgcctttaatcccagcacttgggaggcagagtcaggtggatctctgtgagtttgtggccagcctggtctacaaatcgagtgccaggataggctccaaagctacacagagaaaccctagctcaaaaacaaaaaaaaaaaaaacaaaaacaaaacaaaacaaaaaaaagactgtctctcaccttggactggacttgcctattaggataggctggccagccagagaagcccagggacccacctgttcccacccccagctttgggtttataagggtgcaatgctgccatgcctaggttattttatttatttattttaatgggttctggagatctaacttagactcttacactcatttatcaactaaactgtctcccatcccatttttgtgtatagagcccaggctgttcgagaactcgtggccattctgttgagtcagccttactagtgctggggttatgaagtgggctttgctcatccggtaaagattcaaatacaaagaaatcctgaactgggtgtggtagcataagcctctaattccagcaaccaggaagcaaagactgaaggattggtgcaattttgaagcctgcttgattacatcaccagttccaagtcatcctgggtgcttagggagatgctgcctcagtcagttctggtagataaaatgtcaaacattgttgattaaaacctatttttaccttcaaggttagtagcacatttagtattaagatacttttaaaatcctgtattaaagtgttttctttaagcaggtgtggtagtacatatctataaccccagcccttgggggctgagaccagagggatccaggttagcaggggctactagagaaacctgtgtctcagaacaaagcatctgggggtgggggctttaagtgtttatcattctccactagttctccatctattctttttcttccacaccctagtctctttctttctagtagggttcctattgctggctacccagacattaccatcataataccatttaaggtagcttggctggatctatttattctgagtcctacaatctactttctcttttagccttgcttcctaaatcaaattgacaacccagtttatttttccttcttttatttcaacaactcctgatttaaattggttaggaggctataatataatccgggcacaacctctcccccttggaatctgtatttacgaggcttcctcctttcctggctgaacgtgctgaagccgggcagagtaccttgtgaaggacttcagcccccacagttctctgtgtgcgcatgctcactcttcttacagttgtcaaagtgcttttccagagcggtcacataatcaacccgaaagaagaaataaatactgttcatttttcaatttttatcgatccttaaaaactggacacttaaaggtaactgctgctatggatttactacttgaaattgggttattgcatgtaaaagccgatctattgtgtgtggtgggggaggggaacaggcatctatttctcagactttgctatatataagcaaaaaaccttccaaatcaaattatacaggcagttatttaagaatactgcatactgactttgtaaattttaccttaatcactaacttagcttttgtttaaaagatcttatttattaaaaggtgggtcttgaccttgacagtgaatttatacagaaagtgaaatttgtattatctttaaaaagcattgagaaaaggagcattttcttaacactgagaatttaatgaggtggcattactattaatgccattataaaatattttgagtctaggttactttttggctggggggtggtggtaaagtacagcatttttttccctaccaagagcatgcagtttaagctgaagacattaacaaaaagtgttgaatacaaacaacaggaaaagctgggtgatactaaatataacccaatacatatttcagccatgatgatatagctattgtaaagaaaattctagctcaccaaaacactcacattccagaagtataatggtctactgcagcactataagaaggaagtatgaaaatgtctctgtgcccatcctctttggcagtgatggaactttgtgctgtctgaatccaaggttcactgtcctctctgcgctctatttataatactaatcaaagccattgttttatatagagggaactgaggaacataaaagcaatctaaagcaagctttattgatagtagcaggcaatccctggtgcatgttatattatactgggctgggttttttttctaggggaggggaagagaggaataaaaaggcaagtgatgtgattgagaagtgaaatgtttccctaagccctctatgttcttcgtacacgaaactttgaaatgaaagatggtatctgttaagcgttttaaagatggttttaataaaacagaacaacttcttgtctggtatcctttgtgtaatatttaagagagatgatacctccattttaaaaattgttatctttaatagtccaaaggcagagctgttgtgtgtatctgaatgcccttttacaaatgtcccaagaaagatgcatctctagtatgtgattaattaactgtattaaatatattaatgacgtctttgcaattgtactaaatcatctaaaaataattatatgtttggtcatagctcctttaacatgtcaaaatatttgttttcaaggtctcagccctgtgatattcagatatttaaggcaattaacattctgagacaagttaattcagtgaaaactacacacatggaaatcttttggttttgagtgattactgttttcaaccttgagtaagaaaacaggttgtatgacagaggtgaatatagctcttctatgtgaagtggaaaataccatacactccttatatggctaaatgaagcagtgagggtaatgtactataattacaatgtatgagaatttgggactttgtactcctctatttttaacacttgctagcatatggtaattcagggtcgtcaaaccatagtctttcactgttaatactagtgataaaagaatggattctaaatttgccagtcttgtgaccgaggcaacagcaggaggattcaaaaatgaaaatctggcaaccccagaattatcttgactgtctacttaaatctcagatgcgtttttaaagtcccgcccccactccatctcacagactccctccctcctcctccctccccacctccctccctctgacctcaaatccaaccagaagcatttctccactctgcagagaatttctcaggctcccgttgagacctgaaacgccaagaagccagaaaatctcttgggcagcagaattggagacgagaaaattggagaataagcagaaacaccacaatccttagagtaataagaagcaaacacgtctaaacgtttcagtaggttttcttttcttttccttttcctttttttttttttttttgagtcaggtttcatgtataccaggctggactcgaactggctaagcaatcaggctgaccttgaatattttattcttctgcctccacctccagactactaggattgctttcgccaccacacccggcgatttgcctctgtttaaaaactgggttttcttttatattaaaacgtctcctaacaaaatggagtagctgccgctactgggaggccggagaatgatcgtgcagctgagttcttccaacaaacgcctaagatttcctctcgtggttcgctgcagccaaatgaaacaattatcggcggcaagaaggcagtttgctaatcaagagggctgtcttttccttgttggtttttttttttttttcttaagtgctccagctggggaaggggaaagagagggtcgtgtacccacgtctttttaaccttgctgaaggacgcagcactatttattgacgtatgcaaataactgggggagggtggtgcttgggaaaaaacaggaaccagaatcagtttctcatcgcagggtgaacgctctgagttccggtgaaggggaaagagacgtggcgaaattgctgtctctctgtcttataagcacatctctcactaatacagaaaagggaccgagacgtcagaaagggtgaagacgctcccacagtgtttttagagaccttgctggagccctcctacccccctccccccgcccccagcccgacctgctcttctaaatgcgagattatggatttgcattgcaattggctagtggcggtggcactggattttcgcaagtaaaacacccgcccgcttcagtgagggcattcatgatcacactgacaataacgcatctctctttcttcccgtttcagctgcgcaaaccatgcaggatgatttactgatggacaaaagcaaaacccagccccagtctcagcagcagcagcggcagcagcagcagcaacagctccagcccgagcccggcgcagccgaagccccgtccacgcccctctcctcagagacccccaagcccgaagacagtagcgcagtgccggccctcagccccgcctcggccccgccagcccccaacggccccgacaagatgcagatggagtcgccgctcctgccgggcttgagtttccatcagccccctcagcagccgccgccgccgccgcaggagcccgcggcgcccggagcgtcgctatcgccgtcctttggcagcacctggtccacgggcacgacgaacgcggtggaggacagcttcttccaggggatcaccccggtcaacgggaccatgctcttccaaaacttcccgcaccacgtcaacccggtcttcggaggcaccttctccccgcagatcggcctggcgcagacccagcaccaccagcagccgccgccgcccgcgccgcagcctccgcagccagcgcagcccccgcaggcgcagccctctcagcaacgccgctcgcccgccagccccagccaggcgccctatgcgcagaggagcgccgccgcctacggccaccaacccatcatgaccagcaagccgtcctcatcctcggccgctgcggccgctgctgccgcggccgccgcctcctcggcctcgtccagctggaacacgcaccaaagcgtgaacgccgcctggagtgccccgtccaacccgtggggtggcctacaggctggtcgggaccctcgccgcgctgtcggcgtgggcgtgggcgtgggtgtgggggtaccctccccgcttaaccccatctcgccgctcaaaaagcccttctccagcaatgtgatcgcgccacccaagttccctcgtgcggccccgctcacctccaaatcctggatggaggataacgctttccggaccgataatggtaacaatctgttgccttttcaggtaatgcccctgtgctcttgcacacgccttcttcccacccgttccttccctcttccccggtttttaaaaatcggtccacccgctgttatttagaagggatggcaaattgcagctcccctaaaatcttgtggttcactgggactattctactcagcctgggtgggggtggggtgtgagccttggggggcattgtgactgcttgcgggtagaagagggtcttttttcctttccagttcatttcctccttcgctgtgctcggtgcttcttattttggccttctttgacaaatgaagccgcatgtgaacagccaggtgcgggagtagtcccaggagaagtaggctgagattcctatcattttaagtagctacacattttcaggttacgcaatcctaggctcaaggtgccggaaagccatccacgcccaaaccaccctggctctactcttaaagcggttaacagcctttgagtggtgctattccaaatagttgcatatgctcaaccaaactaatgtgaacacatgtgtttatgtctcactaaggcgctgcaatcactaataatcagcatattgcccctgccaggaaaattacgagtgtgagattccaataaacaccctgaattataagggactgaagtagaagagtggaaattctaggggtactattcccatgttacttaaaaggatttagggttttgggttttttttttttttttttttttttttttccaggacagagacaataggacacgaccttcagagccatattgcaatggagtctatttgctagctagcactgaaatatttaaagctgcagtgcccttcgccagttaggttatttaagaagacaatgcagatcaattacaccatttgaaactgggcgaagtgaaagtcttgcaactttaatgaaaaatgagtcttgtgccttggtattaaatgccaatgaaaaatccaggaagtgctcccgacagaaatattgaatggagaaagtgcccttgtttccattgctttctcatagtctgtagccacagcagtaggcagggtcctggacggtttggatcagaaaggggtgctgagagtgtgtgttcattgcgagcctttgctctccgaagggcactcaccaggcacctgtgaattgatttgtccatatgctttcaggctctgataggagacgagatctgggcgtggcggtgaaagcttatagcagcaccaagactgggctgcaggattgggagttccagctcagcctgggttactgataccattttgtaccccaaaaggaaagaacaggaggcctttgacccctgctgacagatgatagactggcaatttgacctaggtagaatccagtactgttggagccttcaatttgctcatctttaccttttcgaggtcgggtgggagggtgggtcctatgatgcccaaggaaattggattattgaaaacaggtctcaagggtattgcaagaatttttgttcttgacagctcaaggaggtctatgaaaccttcagattgtgtttacgagttttgttgtttgggtttgggggcttttttctgggtgtacactcttctacactctcagtactgaggagaggctttagtgagcagagctctcacacagtttctaaagggtcctccaggtatggtagattttaatattaaggcacaattttagttttctcaaagggtcttatgtagctggtgcttatctcagattatgctgtttgctgaggatgaccttgaactcccgaccctcctgcctccaccttccaggtgctagggttatagacttctgctaccatacccatttctttccgttctaacaattgatcggtggagatgctttgcgatggcattaattctgtaggccgagaatggtgagtaggacagaggatgctggagttgctgcttggaaggagaggctatctgccttgacagttttcattttatccaaacccactcagcgaagataatccggattcctttttaatgtttaaaataattgtgtgtgtgtgtgtgtgtgtgtgtgtgtgtgtgtgtgtgtgtgtgtaagagtgagtgcacttgagcttgcatgcctgatgtatgtctgttctttccttcacctttatgtaaattctgggatcaaactgattgacaggttttcagtctcccttaaattcttgtcttgaattctcaggagtttatttaattggaatacaaataggtttttttttatccttatttattttgagacatgagttctttctacattgcctagattggtgttgaacttttggctcaagtggtgctcttacctctgcctcccaggctagtgagattacagttatgtgatgtcatacctggctaccaagaatgatcagtctttatttactagcaccttaaaaggggattgggccttctgtttggtaatacctttgatcccagcactctaaggatctctgagttccaggccagcctggtctacagagcgtgttcaggacagccaagaacacagagaaacccagtcttgaaaaacaacaacaaaaaagtctgggggtagggggttggaaagtaatataatccaaaatttcaccaatcatggaggggccagagatacagctccattggtaaagtacttgtcgtgaaagcatgtgaggacttgaattttgttctgaaacatctgcataaaaacctcggtgttctgacccatgcctgtaaccctagctctggggaggcaggaagatggtaagacttgctggtcagtgagctccaggttcattgagaggggctgctgtgtcagaaactagtgagatccatagaggaagacaccagacattgattgacctctggcgtctgcatatatgcgctctggcactcacacacacacaatccccgaatctgagtagtagcagtgtgaggatggccagtatttctcaacaaactattgtgatgctagtaagaacaaaacacttttgtcctcttttttttttttttttttttttgtgtgtgtgtgtgtgtgtgtgtgtgtgtgtgtgatagatggtgggcaaaaatgattgagtcatttggttaaaattaaacattttttggcctcaaaaatttatataccctctgtcgcatttctatttatttaaaatggtcacttaatgttttttagatttatttttatttatttatttatttatttacatttatttatttgtattatttatttgtatgtgtctgtgtgagtatatgccatgcatctgcaggtaccaccctaggttagaagaaggcatctgattccctaaagctagaattatgttcagtaagtaaccttcagatgcgggtgtaggaattgaacctgggttctcgaagagttgtaagtgctcttaactgctgtccttctccagctgggcctttaaggttttgaagtaaccttgtattgagcgtagttggactgagtgctgcacacctgtatgcagtcagaaggttgaggcaggaagatgccttggcctatatgttgaaaaacatgcttttggttttgttttgtttagggtctctcgacattgatagtcctggctattctggaatgtactgtgtagactaggctggccttgaactcatagagctctgcctgtctctgcctccatctacccagcactgggattaaaggtatgtgccaccatgcctggcaaaaacttgtttattattgttttttggctttcaagacatggtttctcagtgtagttctggctgtactggaacttcttttgtagaccaggctgaccccaaactcaagagatctgcctgtcttttcttccaaaggctgggatttaagggtattccccaccacagcctggcgaaatcctggtctttaaaaaatgttttagatccaggactcctggaattttagcacccaggaggctgaggcaggagccttaccatgagtttgaggccattctgggctacagagtaagatcttatctcaaaaacaacaaaccagaagtataactagaaccagagaaataacttggttgtgctttggcttgcaaattttctagtctcggtttgtgttaataactatgccaagtatgcttttgttttgttttatgtgtatgtgtgtttagcctgcatgtatgtctgtgtactactttgtcctggggctgcagtagcagatgcttgtggatgctgggaattgaacccaagtcctttggaatagcaaccagtgttgttaaccactgagccacttctctagccccaagtcaaatatgtttaaaaatcaaagtgtcttcattcttaataggtatttatttaaaccatttttctaggactggctatattttattactttactttaaattgacaagtttttctttgtgtgtgtgtgtgtgtgtgtgtgtgtgtgtgtgtgtgtgtgtttatgagacagggttttactttgtatccctgactggcctggagctcacaaagatcaccaagagtctatgcttttcatatgctggagataaaggcttgcctgatttttgttttgttgttgtttggtgatagtctcaccattagcgaggttggcctggaatttgctgtttacctcctcctgagggcttagattacaggaggccatcatcatatctggcctaaattgagcagtttatttcatggaatacctactttaaaaaagcttttaattttaattgtgtgtatatgtacagtacacttggtgtccacaggggtcagaagatgatgttggattcactggagctgtagctgcaggtatctgggagttgccaactctaggtgctgggaatcagactcaggtcctctcaagagcagtatgctttcttaacccctgactctatttttcagtttttaattactattttttttttttttgagatagagatggattctgtagtccaggctatcctgaatcccactttatagctcaggttggccttgaactcagagatccttctgtctcggcctctagagtgtttggattataaaatgtgacccatcacgtatggttctttaattttgttctttttaaacagatgccttgtgctaaaagagactttcaacattatcttttaaaatgtgtctttttatctttgttgtttatttctgagacagggtgtctcatagttcaggctggacacaaatttgtttatatagccaggggtgcccaggacaccactgtctcagcctcctgagtgcccagcttcaagcacatctgacttgacaaataatcagataaacaacaacaacaacaacaatgacaagaaggggccatttcatttgcagggccacttcactttcttttgtcatttgccaccgtcacaataacctcatgtggtttgttttgtaaaagcagcagtgtgctttcagtgtggctttctaaaccacactggctttcttatgccaataaagttgattggtttcctgctttgaggcggctgctacattagggattacttgtatctaaaaactgtttcatttctgtaaataagccacggtcctgagaggtgagtgatatcactggggtcagagaactctagccagtttttttgttttgttttgttttgtgtttgttttttttgttttgttttgttttgtttttttgctacatgtctgttgcttcctgtagtgctagtgctgtcagaattcattgaacttcggctctctttggactccagagggattttgtaatagaactattgtagtgaggcttcactaaatagtgtgtgtgtgtgtgtgtgtgtgtgtgtgtgtgtatactcatgtatatacaggtgtgttcacccttgtgtatggatttggaggccagaggtcagtttctggggtctctgtttgctagtcatcttattttttgagacagggtcttattgaacatgacactatttctgctagactggctggccagtgagctcacagggtatgccttttcctgcctctccacatccccagtgctaggattaccgacagaggctgccactcccagtttttgagacagggtttctctgtgtagctttggagcctatcctggcactcgatctggagaccagactggcctcaaactcacagagatccgcctgcctctgcctcccgagtgctgggattaaaggcatgtgccaccaacgcccagcctgccaaactcataatcttcctctcctcagggctcagtgttagtactcaggcatctgtactggcctgcccttgggtttctgacaggatccagcctcatctgcagccactaagagcatcacctgtgcacattcactatgttctcttttaaaggggccctgcctacctcctctctctttctctctctctgcttctctgtcctattcccccctcgcttttctcttgtgctgttcctgtccccagagactgatctcccctctccccctttcccattccctttctcctaattaaaaaaaaaaaaagcctccacatgagctttgtcgtatggtgtctctttctctcaagccgatttttttttttttttcatttaattacaacactgagctctggggttgcaggtgtgtaccaccactcccagttttttaatgtgtgtggaggttggagaggaacaagttcttgtcatccagtttcgtctagtctcaaatttaagactctgcttcagtctgggttctaggcagatgcaaccactcctgtttactgtggtcctctatcaagttggtgaatcttaattagtggagctcaagaacagtaggaccttcggtgagagagctacacttgtagtatgagacaggagagcctatgtgcaggaaagggctagaaaagagtattctgtctctgtgtgtggtaaatttgagcagcattgttgtccaaggaagtttaaaagaaacctttggaagcacttaatctctgatcactctgtggaaatcatatttctaacacgtgacttgcccaaattcaggcgggtagtttatgtcaatagtagggtttggactcaaccctgcttcacaagttggaggaaattatgtgaatatttcatctgtaaggtagaaagatgataatttactttgagttgggttacagtaattgttactgtaatgatgaccagaatctctgtgtgaacatattacagtatgatatggccagtgttttcatttagtgctatctattgaatagctccaaaatattgtgtaatgttatttttttcttttctgtttgcttaggattgtgttttcatactaggatgagctcacacaacacaatctaagtatcccaaattgccatataatgccatgtatttttttttatgtgttagtattctcagttatcagagcatctggtagtacaattgataattcatcatttacctgtggccaggccctgtgttaatcatttcatgggtagcttccatttgaaactcctttgaggtgaaagactattgtcctcattatgatgattgggaaatttgcattgtttgtttgctcaaggtcttaatagttagtaatttactaacttggaacttgaaccaggcactctgtctaatggggtgcacacctttaatcccagcactcacagaggcaggtagatctctgtgagtttgaggcctggtctacacaatgagttccaagacagctagggatatagtaggccctgtcaaaaacaaaacaaaagaaaatccaggctgtctgcctccagttatggttgctcttacccctttgtattgcctgtatacatcaatacagtgtagatgaaggtgcctaagactgaatttatacttcactttagagagtcaaaaaaaaaaactttaataaactgttttttaatctaaaataaatgttttagtcaaagttgcatcagaaatcaaatctttgacattttccaagagactttagtcattaaccataattatagttgttagtattatatagtataaatttctttctttctttctttgtttttttttttgcttgagaaacagtcattcttctttttgtgtctctctggctagcctggaactttctgtatagtctaggctggctttgaactccaagatttgcctgcttctgcctgtagagtgctgggattaagggtacctgccaccatgtctggtccatgcaattttttaatataatttatttttattttatgtacattgttgtatgactgtgtatggatgtcaggtcttggagttataactgccatgtgggagctggggattgaacccaggtcctcgggaagagcagtcagtcctctcaaccactgagccatctctccagcccggccaacacaattttgaagaatattgaaagccagacatggtggctcctgcctttgatcccagcactcaggaggcagaggcaggtggatctctgtgagttcaagaccagcctggtctacaagagcttagttccaggacagcctccaaagccacagagaaaccctgtcttggaaaaaaaaaaaaaaaaaaaaaaagtgtgggaataagaatgatactaaagggctgggctggggctgtaacttgatagaagtatgcatgccttacatacaggaggcctgggttctaccagtatctatcccccataaaaaagctttaaaaataaactgggtgtggtagtggcacatgcctttagtcccagaacttgtgaggcagaggtaggcagatctgagtttgacgtcagccttatctacaaagaaagttccagggcaaccagggctacacagagaaaccttgttttgaaaaaaacaagtttaaaaataagtatgccaactcattttttttttttttttgagacagggtttctttgtgtagctttggagcctatcctggcactcgctctggagaccaggctggcctcgaactcacagagatccgcctgcctctgcctctggaatgctgggagtaaaggcgtgcgccaccaacgcccagctgccaactcagaatttttattgaacatctgtgttaaacaaatggggttgagagatgtggctcttactgaggaccagggttggattgccagcacccacccgtgtcagatggtacttaaccactttagctccagctccagggcatctgacacctttgcctttgttggcagtagcagttatatgcacaaacctagacatagacccaaaatacatatacataattaaaaagagcctatcttaaaaactaaactaaaacaaaaagctcctaaatatctatttcccaagttaaccatcttttctggaagcaatgtgaactgtctagtttatatttgtcttaaaatagggtagaatgaaaaacatttaaaagcaaaagttcccctctagttttctttcttgttgaaacaggtaatgcagtctcatgtagcccaagatgacataaaatttttcaccctccagcttccattaccaaatggtaagattgtaggcgtgtaccactgtgcctggttttctagtagttattcttttttttttttcttctcctttttattttctatctagtagttattcttaactgcttctctaatggagaactaccgaagacctaacccaccccagactgtttcagaacccattattatgtggttgacaacaaaggctcattatctatattctgtttgaaagggactagagaagatgacatagtcggcacagtgctggccactcaaacatgtatacctgagttcagtatccagcacttgatgtaaaaaacaggtatgacattaacctccatgtatctgcagacttaccctcacaagggaatacaaacacgcaataaatcaaactcgttatcattaaacaacaaagaggggttggactaggaaatactagactttatatgccactgaaacattcagaattatactccttacttgcatattgaaaagtttaactgtataaaccctacaacttttcagtgagttagtgtaacaatatgatcttttggacacatttaaactgtctggcctctgacattgactcagttgttttactttgtaacctttccttttggcagtttggaatgaggaagacactgactgaaccttgacatagtcattggtgattagggttaagtcactcatccagtgactccattcctgtatctccgtaaaagtggagatagactgccttctggtttgctttatgagagaatatgacagtgttataaaggttaggtattattagccattataggagtactgttatgcctcttggatacatgcttatctactgaaattatactcagaattcaagcttaataggagaaaggttgttgctgttccatagttcagtgtagtactgtgatatctggaagtggagacgaactagaaataagtgtgtgtgtgtgtgtgtgtgtgtgtgtgtgtgtgtgtgtgtgtattaatacaagtatgaactgtgcattatacacaagccagctaaagatgatttttgttttatgattgagcatatatgtcacctatcttatagttattttgggtttatttatgtttgtatccaggatttgggggagggtcttccccaattaaatctgatctctattaatttggaaggaatccactgccttttgtttcctatcgaaacaaaagcataacctctcccccaatgcaatacattgtctgtcttccattttgaagttatagaatttttaaatataagttggtttaatttagcagtttccatagtctaatgtctctcagcagctattgctttttgtacattagcacttaaaaattcaaagttaacaagacatcctgtgtattttctatccttatatggctttttcttaaatcttctcttttaaaactttactattttttaaaatttatttagctttattttatgtgcgttggtgtgaaggaacttgagctaccgatagctgtgagctgccatatgggtgatgggaattgaacctgggtcctctggaagagcagccagtgttcttaactgctgagccacatctccagtcccaaaaactttatttatttattttggtttttctttctttctttctttctttctttctttctttttttttcttttcttttttggttttttgatacagtgtttctctgtgtagctttgtagcctatcctggcacttgctctggagaccaggctggcctcgaactcacagagatccacctgtctctgcctcccaagtgctgggattaaaggtgtgtgtcaccaatgcccggcaaactattatttttaaactattttttctatcactgtctatatctatttttttccttatgcctatgcacattgttaaacacactgtgccctgtttagagttttcttttttttttcatctgaacctgctttactatgtatctgtaatgttttctgcctgcataaacaaaaccttaaagcttctgtctgacttagctcgtagtgcactgacagcttgagcactcaggcggctgctgggaaaatgtactggtcagcaggagagtcacgggactaggaagcagccgtgtatggctttttctttttttatgctttctcaagtcttacttggatatatgtggctggatgttgggtaccatttgtagtcagaccatttgtagggtccccaataatgacacggagacttactaattataaaaacttgactgatagcttaggcttgttattaactagctcttataacgtatctacatgtttccatatgactcatggcttttacctctccttatatgtctgttacctttcggccactggagaccttcttcccagtgtcttgtgtgcctgaaaatcctgccttgctattggccattcagcttattggccattcagctttgtactaaattaggatgatacatctttacagtgtccaaaaagattattccacaacaacgctcagttttctgcctgctacaagtgttgattttcatatttttttgagataccaaggctccaagaggaagttcttattaacacttcctaggagcctatgtttgtatttctgatagggaggggcctttacggttgtaagagagaattcaggatagagcctgtagtttgactattgacaagttacttaaattctatatcataaatcggggagacatcctggggaggttattattgtgcttgcaatggtaggcaaactcataaattttctacaagtggtgttttatagtcttctaggtaggttgctctgtgagagtccaaatgatatattttagcttgttaaatggtgtgtgtgtgtgtgtgtgtgtgtgtgtgtgtgtgtgtgttagagataagatagtctcatgtgcagccctggctgacttgaaactatggagctcagtttggctttgaacttgtgatactccttctccttgagcttcttcttgaatactgagattacaggcatgtactactttgtactctttatatgtgctggataaacttccttgtttgaactactctaatagttgaaataggaaagcactcatgaactaaaatacaactcagcatcttggtataaagcttatttttctttccccagaagcactataactaattctcagaaataatatatattatggcataaatctctgtgggcagatctcagtagagagaaacaaaaatgggttattaatatcgttcgagaggatcatagaattaatatatccaaaggggaggaaacatggtgagctatgtatgcataaggctatttattgtaaagacaaatagcctcattctttgagccttgaaaggcatttaaaggacaatatccgcagggcaaagaagtaaacttcctttctgagtactcagcaggtagctaaattgatagtgctacaatgtcagccagttcctagaagtgctagcaggccagcctcactatgaggctgaaaatgtaaaccctattgggtcagttgtgtcttttttataatgtgtgtatttaacactcttgaaacattttctgccaggcatccatagaataggaaaacataggtaaattattatgtatagtgtcataaaaagtatctgttgatttgtaaaaatataaaacgttattgtttctagactatgaacacttggtttctgggctgagactctgattataaatttgatgtgctaagaagtaagctgagtggttttccccccccccccttcagggttaaacccagggccttgttcttcgtatgtaaacactctacccagagttacaccccaaggggttttgctttgactcaaaaaggacttggagatggtgatccttcttctgtggcctccatattgctgaggtttttagacatggtgtcatgcccaactcctcctttggtcctctgatgcaggatcttgctgtatagctgagggctgcttggacaaggctggagagtgctgggatagcaggcatgcgctaccacacttagctgaaatgttgcctttcttttattagttgattttttttttctgagatagggtccatgtgttgcagactggccttgaactcacacatctgcccacctctgccacctgagtgctaggactaaaggcatgtaccactttgtccagcccagtcattttattcttttggagttaatttattctgtcacagtgatgtggtttattctcgactttccaagtcacattattaataatagaactgagtcaggatgactcataataacactgagaagtacttagagggtggtgagatggcttagtggataaaggagcttgcatgaaaactagatgagctaagttcaatccccagaacctactaaaggtggaaggagagaatcagctccataaagttgttctctgacttcacatgtaggccatagcaattgccctgtctctggatttcatcatgcacacagacacaatattaattaatcaaattggggggaaatatcccaaggagaaaattctggtttaatagtttgacaaaaagcaggtgatagtagggtattcagctagatagccattgcagcctgtaagactgggaaacagataaaagagcaaaagatttttgatatttttaaatttaaatatactagaaatttatttttcatagtttttgatgtagaaagtttgatgatgacatcaataggttccatgtctttgtgaggttcctctctgtctgcttcatcgatggtgggtaccttctgtgttcctctgtgcttcaaggggagattttgaatcttacaggcatagtggggtctgaagactgatgaagaagggggagtattttagaagaaacagcttagtgacctggctggctgagcctctgctcacattccagatcttaggtttcaaatcagcagtttgaagtgcccagaactgccttgcctgtctcttacagtctggtggaaatgtcttttcttcttttttgtttgtttgttttgagacagggtttctctgtgtaacagccctggctgtcctggaactcttttgtagaccaggctgccctcgaactcacagaaatccacttgcctctgcctcccaagtgctgggattaaagatgtgcgctaccccacctggctgtttttctttaacagagaaccataacctagatatgcagaggacttgagtgagaaaggaccagtaagatttatgagattttgagggaaagccaaagtaacttcatcattggttataaatttgcttttgtgtttgcctagtagactcagataaatgggttaaggaggagggttttggggcatttttgttaattacaaaatttacattgacttccttttggcatgtttactagaagtcatcacccatgtagtctgtcttttgggtatcgtatcactttggtgttcctcttcaggcagagatagctaacacagactcacagaccggaaggccaagcacccgcctctctcttacatacattattttatttaatccttacacattcttgtgaattagggattatgatgaaagtcatttagttgtgctgtagcagtgggaatggaaactcggttcttgtgactcttgttttgtttgttccccagccgtttgcccctggtcttgtcgcgtgtctctgttttctagactgtccccaattcccttcaccccacattgttttaaagcacttaacactctgaaatgaacagctgtgtctcattttattctttgtgagtgttctctgccacattataactggggtacataagggcgcggatctttttactgcagtgtccccataggctgtgacaataatctgggacactttaaatacatagtcttttctgcatgcgttatttttcacatttgtagacaattgataacgtatttatcagtgagtttacatagagttaacaatgtgagaataatttaacttctgtaaacacttcctggctaaccagggctattagtgctgaagctgaaccgtgttctgtctcattcggctcccagacatgtattaaaatagaagatgaggcttaaagtagagtatgatatgcccacaaaaacgtatacccatttatcaaagagaaaggatgattaaatttgtgtgggggcttggaaaatcttcatagtttttaaattttttaaaataatttgtgaaagtaattcatgttttcaattttaaaacttgaggaaaattactgattgctcttaattctttttttttttttttcaagatagggtttctctgtgtagctttagtgtgtcctggaacttgctttgtagaccaggctggtcttgaactcacagagatactcgtgcctctgccttccaagtgctgagattaatggtgtgcgccactactgcttggcattgcttttaattgtattaccaagacagaagtgttccatgttgtccaccatttatcacattttattattattttaaaactagtatattttagtcaaaggacaactttgtggagtcagttcttctcacctttatctctatatgagttccaggatctaactgattgctagcctttggagcaagcacctttacatgctcagccatctttttttgttgttttattttccaagatagggtttccccatgtagccctggctgtcctggaactctctctgtagagcaggctggcctagcactaagagagacccatctacctcccaattaaaggtgtgtgccaccactgtctagcacactgagccatcttgctggctcagttatccatccatccatccatccatccatccatccatccatttatcatccatctgtccatccatccttccgtccatctaccatctttcttttgttttttttttttttttttttgagacaaggtcctcactatctacagactaggctggcattgaagtcatagaagtctgcccgtctctgctttctttgtcctgggactaaagacatatgtaactatgcctggctttgattatctttttcatgcatatgtacaatgcttttgacatagtagaggtaatttgtgtacatcatttcagctccttttttttagcattttatatcattaaatttataaagattttgataactgcatactagttaatacaataatcagttccagttacccaaatgtctctatattcagaggatttagattattttcaagtatattttttatttttgtgtgtgtgcttttccaaaactttgatttttaatgactaaccactgtcatgaatggctttagccatttcagtgctttgtttagaacggaatgggccagattccatgggtagacaagagaatggtttggagagcgcaccaaagattcttagttcagcagcgggaggagcaggtgcataaagaagaaactactagcatggtgtgctgaatagagcagaagatttggaatagaagtgaggtaaataagagatacggctgggaaaacagggaaggccagctcacagagagcattctagtatgtatgctttcaacgtttgtggtactggggtcaaaatgtagggccttatacatgtgaaatatgttctctatctgtgagctgtaccacaagtttacactgaaaaaaacactttggaaaaattatttattatttgtgtgtgttcatttgcattatgatacgcgtatggaagtcagaggataagcttatgaaatcagttgtctccttgcaccttgtatagtaggttctgggggattgaattcaggtcatcaggcttgcattgtcaagcagcaagatcctttttctgctgagacatctccccaacccacatggaggactcttaagctgggaagtatagccactgcaaggcttttaagatgattactggagtgatcgatcacatttttatttcagaaagattactctgggatataggttgtcaggaactaaatacaggtgaaaaatcagttaacttgtgaggacttaagttggttgaaaggaaagagtggactcaagaagtaactaggaaatctacttagacataggaataaaacagagggggggatccctacaatggttcctgggtttaagtagttggaaaaatagtccaaaggtgaaagtgcttaatagtggctgatgtgaatggttgtgtcttataagtcagttggactttagagtagaggaatttcagaagggaaggctgttatgtttgggatgtctgaaaaggtgacttgacatctactcttcccatgcttttgtgtagtttttaatatgttaatacattaaagtttctccttactagtacagatcacttcatgggccagtgggtaaaacctctaagagaaggaataaccactctaagttaggagtttttagcctgattctttttcataccctgataatttagagtttcttagttgattagtcagtcatcttgttgcagattatagcctggcattgcaaagaactataagtaattgctcaccaatcaatcatatgagaagatcatagagaataaagtaaatgaagcctgcatactaaagttgaataacctcactgggaggtcagtattattggttagtctgagcattattaataaaaccttgacaaaattgagatcagaccttggactttagttctgctgcattaatttatagcctagttttctatctgtgtgtttatttatgcatggcaggctgcttcgaactgactgtgtaactaagtatgactttgaatttctgatccttctacctctgcttcccaagtgctggggttacaggtgtacactaccatgcccagcttgttggatttgatgcaacagtttaaggtgatgctttatcaggcactgtactgctcatccaagggggaacttaccagggaatgaaaagaaacatatttatttattcatctttttattcaaagctcctacatagccaagactggcttcaaactcaccttgtaactaagaacaactcctgatcctcctctgcttcccaggtgctagaattagagttgtgtgccaccatacgtggttttaaaaccatttttatttaaatctaggtcatgaccttgtcaaaattgttaaatgtagtttaaatagttgggtattaacactgcagaaatacaacttgaatattttgaagtatccagtaatgctgatgaacatagtattttgtagtatttgttaaattaaaaattattttgattttaaacagaataaagcagactttgctcccacttttagattgcacagttaaaccttggataaattctttcaaaagcatttaggtttagcatggtaaaggctggggcttgatgtggttatcagtttcactatattttcacctcccatcctcagtattccaaaaagatgatgagtgagtgaccagaagataacagaattaattaatgccttagagcttagttttcctttctacccatttgtcagtacagagtattcgcttttacccatcagctctgaaactatgaggaacataaaatgctattccagagtagctattttaagacagatgagtcatgcaggtataacacaagattttctttttcaaatataatgaggtatttgatattctaatttaggctcagattctgttaaatgtgaaacacagaaaaaaattgaaggcctggcatgaggaggaaagctagaaaaatctctttatagtgaatgcattccttctcattgtggggtgtagtgggatgaagcagataaggggttgcagtaacacattctgttacagggacataaataatagagaatgtattgaatacatagaggtcaaaggacagagaaagacagtgaagaagattcagcaaagaggacaaagctaagtaagtaaaaggatgcttcagcttttgttacaataattaaatatttaaaaagtcagccattttatacgggccaggaagctaaacaattgttcattttatattcttttttttttctttaaacaagctataggcaaatgggcttacatcaaacatttatattaagaaatttcttttgcagagtgtcatatgcaagttcaaaacccagtttttaatctcctgtggtgtgatcataatattcatgatgcccctaagacgctcgatgtttgctctaaaccatcaaaggaaaaaatacagtatattcagcatgatttgccttgtgtatgttaccgatggtctagactgatgacttctcacagaaatcagtattgtaaaagagtgatccatgtgaaaatgaaatggttacagtgttttagtcaatcagcccatttgtgctgcagtaataaagtaccagaggctggttagagtataatcaacatacatttatttcgtcacagttgataaaggtggttagtttggtgtctggtgaggactgcttggtttccaagtgggtttcttgctgctatttcctcacaagagggtgatgttatgtcctcaaatggcaaaatagaaggaaaaaaaaaaagtcctacccaggtccttcttgttaactggtccattgatcacttctgaagtggctccaccccttggcattcccatagtgagggttcagctttgatgtgggcatttcggggtttattcagactatagcagatgagatggatgaccgcatgggggtaagtgaaaatatttgtgttgcttgagaatactatgtattcagtggttgaaaacaagtcattggtatagttagttttatgtgcacttggtttgggtgataaaattagcttttttaaaagctagtctttttgttgtgacaaatacatgaaagcaatttagaaggaggaaagaggtatttggctcatggtttcgggctgtgattgacttgctgcattgctatgggcctgcggggaggtagaaatgaccctgacaagagtgcctggtgagtaaagtcactcagtttgctgtagtgaaggagcagaaagaggacagataggaaggggtcagggcaagaaaggacctgttcccagggccctacttcctccaaggaggcctgtctcctagagtttctagaactgcacacgtcccctgaaagtaatgtcagcagctacgggtctcagctttaccacaagggcctgtggagaacattccacagtcaaactaacagcttttcacaaaaatggcctttatttctgtaattctggattttatatgtggctgctggttagaggcaatggtagggtgtgattctttctgccctgggagaaagtttagtgtctgatatgaaacttgagtaacctctgctttgaactgtttatctatcaggtatcaaaccataaaaataatgtttttatggagtctaaaagtttgtgtcatgtttctggcctgttcatgagtgtcaagtgttgatgaagttgaagctttgtgtctcttgctctgaattactcttgtgttcttgtgctgtgtcacaccagggatctgagcacacataggatttgctcttctggaatcaggtagatcactataagtatggattttgatttaggtaatgtaaatcactagacagaagaactatgtataagttacatagttaactggattacattatttcagtttattaaacttttaatgcttcttaaatacaacttcaaaagagctctgcataaggaccagttagggaaacccatggatcatagaaagtgagtttcctaatgttgtggagtaagcacctggcttgggggatgttggtatatttaagaaaggttttgggggcaaagaacagtttgggtacaagagttatcaataagcaaaatttggggcaagggttgtttatgtttgtaaaatggccggtttgctagaataattagtgaccttaacttagggatacaggaattcaagcagagttactataagatgtatttgtctgaagtaacactgcccaaggaaatagaccataggcctcatagacaattaaaattttttttttccagtagcacatttaaaactaaaggggtggtatggtggggcatggctgtagccaaggcactaggagactgaggcaagaggattgattgagtcctggagtagctagcatttcgttgttgttgctctgttgtagtattttgaagtaagggcatacatagcccagctgtccacaaaacttttttgcagaaatgattacatgagcctcccaagtgcacttgaaaggtagctgctgtggttagaaagcctttctttcatcttttctacctactaaaagcttctccaatgatgactgaccaaggtactgaactgtggacatagtagaatgtcattaggagtcatattgttcctttagcagaacagtagtatttggtttgcaccaaggcccatggcctatccagtctcaggttcttagccaccctagcagtgtcaggtatgggttccaccccaaggagtgggccttaaatccaatcaaagagtggttggttacttccatgtttgtgctactactgaatgagcatatctcccaggcaagtcaccactgtaggccacaggtggtgtagatgggtagatggttacctttttcctgtggtaggtgcagagtaccttccgtgaatgttagtcagtagggtggagcctttagttgggcaccagcttgacttctctgtgtttgataaaatatttaagtgtcatcttcagcaatagagtcttaccataagtttgtagagagtaaccgataaatagccttggtaatagcgatgcttaggagttttcatgagacctctttggccttcagtataacaagatgtaaccccattcctggccctggaggtttcacttggtgcaagagagctctacttagggcattggtttttctatgattttgtgatttcatttagagtccaggtgcaattgacttttatatagagtcaattgttttttgggaagctcccatggtagcaggtttccatatggttcttcaaatgaccctcagtgttagttgtccctccccacactccctccctttccttctcttccatccctttccccatttaatgcccccactctgttctcctcgttatctctcaataacaatatattctagtttctctttcctgggagagcctctcctctcccctagtctcttactaggtacctaacccatggttatacagattgtttgttgcacacatagtaaagacttaaaagccaacatccacataaaaaaaggaattataattattgtctctttgggtctggattaacttaggatgattttcccccccctagttctacccacttacccgaacattttatttttcttaatggctgagtattatttttgtgtaaatgtgtaccacattttaattatccattcctcagttgatgtgcaaagtgcaactagtactgggcatatagccagtattgatcagttccactaatatttaattccagtaggttttttgttgtttgcttgaggtgagaaaatttgggtctttggtctcctgcagtccacagtgcttttagatctcctccgtcagtggttctctacctttgtgacgctacagttctttaatacagctcctcatgttgtggtgacttccaaccataaagtcattttcattgttactttgtaattgtaattttgttagtgttatgaatcataatgtaaatatctggcatgcaagatgtctgatatgtgacctctgtgtgaaagggctgttcaacccacaagttgagagcagctgcccttggtagaggaggatgacctgaacttctgatccccctgcctccacttcttgaatgctgagatttgaagactgcaccaacatatgcaggttgtgggggttgaaccaggcctttatgcatgttagggaagcaccaggtggctgagctgcattcccatccccaaagtccaagggtttttgttgtttgtttgttgctttttaagttttattgtttgtgtttgctggaggtggtgagtgtgtgccatagcacatgctcccagaacaactttggagttatctgctgatctctccttccaccctaataagggccctgtggattgacctcagatcatcaggcctgtgcctcaggcactttactgtctgaaccatcgaactatctcgatggccctcaagagtttctgacagccctgttgctggtttaataacaagagaaaaggtctgggatgcacttaagtgggataaataatgtccaagaaaatggtgtagtaagattcaggttgtatttgaaaatgcctcatgagctataatctataactaaaaggtattaagaggaaattgtattatttgtagcctggtgtgcaggagattgagttcctaggtcaacatataatggaatatatacatattcctttctggtccccaaagctgaatacgaggtgaaaaatttaaggctgtactaaaattaaactctttttagtagaattattttggaattgtgcatattcatgcccaaagtaaccctttgcttcctggaggattcactaaactaccttatcatgattttcaaggatttggcaagtgttatttataaataggccttacctattttcaacctttagcctctatgccctttgaagaatatgcccttttatttcttgaggaaattgagcgttctccttgcctcaggcctcttctcctgtgtttactcccatgatccccaagcacacagagctgtcacggcatttatctcattgtataattgttatctgttaactgtgggtggatagggcttcttgtagttagactgtgccgtgtttgttttcatcattattgcttggctcattaagattgccagtaaacacatatgagacaaatgaggcgagaatagagtcttcagaacccttggcaaaatttgttagcactgacatccaaaagtaataaagaaatttcttcttttgaaaatattttgtaaacagggtgtggtagcaaatgtttgtaatctaagatctggagatagagaccagaggatcagaagttcaaggtcgttctctggtacaagcaagttagaaaggggccagaatgacccagaagaggtaggctcccaataaatgaataaattctgtgatgtggacattttagatattctgaccaaaactttcttaattttactttatgatctttaaagtgctttactgttactagagtgatgcagctatatttttaaagtaagttttatagtcttacaaaaaccaaatattttaattattgtagttgctttatgtttaaagactttaatatctctcttaaatgtggtaacatttaaatggaatggaatagtgtaattttttctgaaatacttacaaagcagtctatgtagttaaaccatcttcaagaatgcctgatttgtattaaggactgaattaaatatcagcgtcttcatgagttaacaagagacgctgcggtatcagcctcataggacagttgtaatatattgagataatgcatttaagtaagccacacagtacatggcagctatgacttagttctacaagcctgtgtgctaggcccatgtatggaagacagagaactttagggactctgtattcagggatggaattcaggaggtaaggcttcggggcatgcatcattactggtgagtcatctcaccagtcctccatttatttgtaattagaactatacaaaaacttgagatgtagagtatttgttattacctatttccttcacttagaaaaaagggctttggaaagggagtaataagtaatgttctgttgattcctgggatctagtctgtcaatgtggaatgaatttatttggtaattaccaggtactgtacattaaatatacactcaacaacatgagtgacttttccagtggtggccaggaagctgacagtgaagagctgtacttagagatgccagtctgtccattggacagactgttgttgatttctgaaagagaaccccagaagactgccagttaagttggtagttttgccttctatcttctctttgcctcaagtcagcggcacagatcccaaatccaagagcaagaggataacagggggccacagcagaagcgttcacgtcgcggcccctgtcagattctggtgaatctgcgaattctgctgtacatttcctcaccttgcccccaggtcaggtgagaattggagtgaaaaggagaatggtagatttaatgtatcattacattcccatgatgcttctagggagaccgtggagcacaccaaaacactcgttagtcgtaagtggggtcagcagagtcactggaggatagacacagtatatcactataaagcaggaattttcagataaaaaaaaaatgagaagcaataggaaagcatgagaagatgctgcttgtagctgtttgctatgtatataggctcctgaaggagaaatgtggcacatgtaagtggttggcagtcatttgtctggcagtgggtgactttggaattctgctactgtctgttttaggttctgttccttaaatcctttagtgacccttgaatggaacagctaatcaaggctttgtctttgtctttccagagttgtgggtcaaaaaagttagatctgatgtctcattcctaactggatgattataggtagttccttagtgtcatagggctgtttgatttggttttggtatgttttggttttagttgggagggcaggggcttatgtagcccaagctggcctcagataaccgtgtaattaggctgatctgatcctcctgcctctgcctcccaagcactagggttacaggcaagtgtgtactgttacttttctcactttgtaataagattttactattagctgaggctgacccccaacccacagtctttctgctttagcctttgagtgctagaattgtaactgtgcaccattatacctggctggcttgtgagactttttttgtaatattatcaaagtgtaatttatatatcatgaaatgtaaccttttaatgtatataaagcggtaggctgtactgtgattctaaaagtgtctcgatcattgttcagtgctcgaagcccctctgtgtccgttggtgtcagtttgcatcttgccctgattagctaagtcctagccatcaatcaaccttctttgtgtctttatggataatttcctattctgatcatctcatataaatgaaattgtggtgtgattctccccccttcccccccccactaggtttttctggcttaggaggctgttctggaactagctcttgtagaccaggctggtcttgaactcacagagatctgcctgcctctgcctcccgagggctgggattaaaggcgtgcaccaccaacgccccgcttgtggtgtgattctttgaggttggcttctttcacatacggccttttcaagggtcatccatattactgcaggtattgagtagtacttcgtttgtttttatgggtgagtaatatgcagttacaggcgtatgtacctcagtttgttctccagttgatagacatttaggtagtttctgatttttagaaaagttccataaagttgtcataagaatctatgtataaatttttgtgtggatatgtggtataatttaccccaggcagctagcagtgggctgtggggttgtattgctaagtgttatgtttatctttggaagaaattgccaaactgctactccacagtgcctgtgccactttggaactttgcatccaccagcagtttatagggtgctgactcgtctgcacagcatttaaaaatgtcaagcggttttttttccttcttttcagccttgtagtaggtattcttgtgtgtgtgtgtgtgtgtgtgtgtgctttttttttaagtgaaaaattttgcaaaataaaattagcagagtggagagttagaaacaagtaattgttaaatatttaccatgtgctatgccctgctaggtttcacagaaggaaatacagcatgtctttacttccatgggacttaaggtttattgagggtggacaatatgtaaggaatgcagaaggtgtgccaggtgtcatggaggaaggaggacctctgtctggtccaggccagccatggatgcatagtgatatggctgtctgaagagatggagggtgggggatggagggagagggactggttgaagtagaggcagaatcgggaattcaaggtcaccctcagctacaaatggagttccaggcaagcctgggcagaagatcttgtttcaaaaacaattcaacaaagcaaacaaacaacatgatagcagtcccttctgatttgagcctgctcagttacaggaccaggactcaactcaggcacatctctgcctactctttccctgctccctctggtcttaatttctcttcacagctcttaatggcaaagcaggtaggaaaagaggctccatttatcagctttcaggaaaccggctctttaaatcccttactcatctgaaatgactctacatattgcagccagattctgcagggaaaatctagaggggtcaaatgtacaaaaaagtacaaacaactgatactgctgtggtcaatggttcatattgaaacagtgcatacagacttttgtccagtgattacaagctcatggggtatagtccaatgattcaatgatacagtattgttctttatgtatgaggcacttgattcaatgtctaacattacaaaacaggcagaaaaggaaacaggaagaaagggaagaaggaatggaaagggaaaagaaaaggccaggcatggtggcaaatgcttgtaatctcagaatttgagaggatgagactgaagggccatcacaaggtcaaggtcaacctgggctacacagtgagtttcatgccaatcaaggccatagcgtgacacctgtagaaaggaagcaggaagaggaaagtgtgattacataaggcagtgtgctaagcaaaaggcagaaatcaaacctaaggaagacacggaaagggccatcagggactacaatataagacaggctttaaggggcttcaaacattaaatctgtcccatttcctggcttattttgtgtattgatttttgaaagtgattagctgatgacattccagatcattggttgttaaacatgtgattggtataactgaagggaccagaccttcacccatccccctgttttagcagccatgacaggctgcagaaaagacccagcaggatgtaggcctctgactcagcaaaatgtgctcagttttcggcctacttgctggaccttgccgtcactaggaggtcagataccctccatgtggcaaggaaccaattagaaagtggtgtaatagtgacatgcagaacatggcaaccgccctgggagggcctataggccataacaaccagttgaccaatcaacacaggacaggttgcccaagcccagaagtgtaccaaacctgagactattgtgtacccctagacactgcccttccacatccaataagttccctggggtccttctctctccctcccagaagacctgagttaactcattaaataataaaagactgtttgcttttgcatcagaatgggtcgcttggtgatttgggggttcagaatttgtagctgagggtgaccttgaattcctgattctgtctctacttcccaagtgctggacttgctagtatgttggaacactcccatttatgcagtgctgggggtcaagcctggggatttgtgcatgccatgcaggcactctaaatccctaacctccttgattaaaaaaaaaaaaaaatcaaaacttaggttatcttggtttgctattagtaggaaaaaaaatacagtgtggtaaaatgttaaggtaattggaattagtcatcttcaagaagaaaaagataggaactaataatttctgtgtaggcactaatcttattaaagactatatttaggattgttgtattgatggccttttaaaaacaaacaaaaatttaaaggatattcaaacagggtatggtggcaagtgcctttgaggcaggaggatctctgagtcagaggctagtcggcctgacctacagaaagagttccagccagggctacacagagaaaccccgtttcaacactcacccccaccctcccaagaaaggaaaaatgtcaagtttataaggatattaagttagataaaaggaacagtttttgccagtgaataattggggagaatatggattcatctttcctagctacagattggggataggttattgactgaagggctccatacttaagaagaaaagaaactctgtatttggtaaaacttttttcctctttccctacaagcttgaggttccctttatttataagcggctttacttttgggtcatatgtacccagttgcttgtcatttcagtaaactgcaaattaaaaacaaaaaaataaaacctcaacttttcctgacaggttattacagataatagttgtggttggtttaggagcacagattcctatacttgtattttgcaatacatagaaaattggttactacttatgtaattgtttgctggttctatttagtagccggcactacatgtttgatctgttccttgtattcttgcttgaagtcactttgtgctgagttcttatgtatttactgcctctggtttttactcagtgctagggaagtccataaatctttgtttcagtattaatgacagtattaatagaaaccatgggttgagggacagttgtgcccaagtagaaccagcatagaaaagatgaagttaaaggaccaaatggacaggatctggagagatggctcagcagttaagaacactggctgctcttccagaggacctgggttcaattcccagcacccacatgcagctcactactgcaaactccagttccaggggatcctacaccttcataagtcatatatgcaggcaaaacagcaatgcacatgaaataaacataaataaatcatttaaaaagggaccagaagaacatactgaaaaaattaggcaaggaatgaaatccccaagtcagaaatgatttcatagattgtacactgaaatgatgacataattactttgtgggaaagatgtatttatgacgggatggaggaagggaaaggcaagactatataacctattaaaagggagctgtctcagacatgataattttgttttgtttttcaagacagggtttctctgtattgctgtggaggttgtcctggaactccctctgtagaccaggctggcctcgaactcagagatctgcttgcctctgcctcccgagtgctgggattaaaggcatttgccaccaacccccggctataattttcatgttcagagaaaagtaatacagaacagagtgatagaaatagaattcttagtgtctgtggtgagttggtttcagggcctcctgtgcagataaccaaaatccacattcataaaatggtacattggtaaacaacctatgcatatcctactgaaactttcatttcttaaaatatttttatttccttagtgttgggaatgctcatggttctctcctgtccatgtgagttcaggagtcagactcaggctgtcaggcttgctgtgtcaggttcctttgcctggttagtcatccctgctctgggttacaacagtacccactgtgtctttagctgctattgagaaaatggggcagtaaaaagtctgcatgtgttacagtatagctgccctttgttcaagcatttatatgctctgctttccagtcagtgcctaaggaagggccaactctgtatttttaaacttgcaaaatacatgccaaatatttacagtgatctgaaagagaaagtaagactggagacttttttgggggtggtggtggtggtgctctgtgtgtatatttgagaagaataaattcatcaattaaaccatacagcaaatatccattttaaaaagataggccaagccagatgccatgcagccagtgtgagcctagacctggagggactaaagaaaatccaagcatgaggccactgggtcttacctgttgcctggtcttggttttgaaagataaaactcaagaactccaggctggatattcagagctggtttccctgcctccccccacttccaaccagttgctaaccattgagccttgggcctgggaccaaagggagctagaccccaatccttatttcagagaccacacccccactcctagtcagtctctgttcctatctgcttgcctgtcacccactgtaccaagctgggactgctcaacttctgaaaccagagttccaatagggtgggactttgctaccctactttgccagttatatatctgtctcataggtttgtaacctaactttgaacggttgcataagctctgtctatccccaggtggcagagaattgaagacactcagtccagtgcctagcacattacaaggtgcaatgattatttttttatttttagttaatgtgtgtatgttgggatgggtatggagggggagccagcctgtgaaggccagagaagaacctgaaggagttgtttctctcctttcattgtgtataccctggggatcaaactcaggtcatcacacttagcctaaaactctattacccactgagccatctttctgacctgccagggttattttcataatttagttcccagatactgttggcccttaaagtcttctactttgtgtttctggcaaagggaacacccaagtatttaaaaaaaaaaaaaaaaaaaaaaccagccagaagagcaggaagtaagtgagctgggactgagaggcggggccacggatgggttggagagtgatcaaggctctttttgagtctaattacttgtcacttgaatgaggtaattgaccaagggcacatgagtcaggtggcttgtgtggcagaggtggagagtcctctctggattgtctgggttaggttaaagaggtgttttaaaaagagagggtgcaggaggatatcacatggacttgattgaatttggaccctggtgctaccacggtcacctttcaccactggtgctatctgcccaggactcagactcacaagtgggggacaaaacagatctccttcctagagactgtgtttctttaagcaagaatcccattgtgcagcccaggctgccctcctgcctcagcttcccaagaaagagtgcaccttactttgtcttccttccttccttgagtattgagataattttaagtacttgggtaaatttattaagtcaggcgggggaaagaggtcgagcctcatgcggtatggagatgaaccgctgtcagatactagtgtctgattatctttggtcattatttgggaactccaaattgtttacaggtgttctccttcttgttgaaagtgaacagaaagctgttttcctttctccttgggaggaaatggaacttgggggggccgggacttggtgagtaagttgctgtttgcttatctgcttagcctaggcttgtttactagtttgtgtgttgttgagtgtgggtgcatacatgtggtgtgctcatgtggaagtcggaagatagtttttaaatattggttctctccagggatcccatgattgaactgaggacttcagggttaccagcatgcagtaatatctgctgagccatcttgctgccactccccatgtccctggggacagctgaatctgacctggactccagtctatgtgactctttgtaacttctgtgattcatgaattgtagttttttccattgaccattattgcaaaattttcaggttttttcttttcattttttttttctgatttgcttcctagttaactgtttatttcaacactgtttgctacatataggccccaaagataggacatacagaacagtgggtggggcagttcaaagccctgaaacagaatgtgaagatgatggcactggtcagccacagataggccaaacccagggcccaagaaccagatatatgagggacagtgggtgatagtgatccatgctagctagatcagatcagagaggcctcaagactcctgtcaatggagaccatgcaaagtgttgttgccccttcccctagtaaacgttttcttttttttcttttttttcctgttgtttgtttgtttttcaggacagagtctctttgtgtaaccctggctgtcttggaactcgatctgtagaccaggctggcctcgagctccaagatcagcctgcctctgcacccccaccctctcacccccagtgctggcgttaaagatgtgcaccaccacctcctggctcccagtattcaatttaagggtactcatacatgtaattataacagactgagtcttaggtaaattggcttctgaggacagcacacccctttcctaggactccccatgagggaggcacatgggaagaaacaacagggagaagaaaaacactagcttcagcctgcaaggagcagcatggctgcttgctcggcccactctgcctcgagtggattcttgcttctcgatggctctggctaaactcttgctgactgtgtgatctactcccgtgtcctgactcagttcttctcctggagaacataagaattgagactgcttctgggcttgagactagtggaagctagagacctccccacaacaactgtatagtgaaatcaaaatgatgaatgctatgccacaaatataaagtgatgaggcatggatagaattaattttatgagaaaataagtctcttaatggattgcaattttattcagttaggaagcatgtgcaaattctgtttgttatgcttgccacatgtcacgttttcatctgttgagcattaatggacactgttcagtgtgtattgataaacttcttatagatatttaaatctatgttccagtactggatgtggcattacagaagacattttgtgttctttccactgttgttgtagacaccatacaggtagctgttgtgcattctttgttgtgtgtatgtacttgcacatgtttatagaggccagagttgatgttaggtgtccttgtccatcagtctccaccttatttttgagataggtcctcagactggatctgaagtggccaattcagctagactgggtagtgagtcccgtctgcctgttctttgtgagtgatggatctgagccaaagttctctagcttgtgggacatatactttactgtcgccactgtcaccaaagcactgggcttagcagcaaacaccttttccctctggccatcttgctggcctttcctgtaaaatattactaagcatgtttgaactggagtccaggagatggggagaggaagcacactcatgtagaatctagtttaacttcctcaggagttgtccactgatcttttgaggtaaggtttctcactgacctagcactctctgagccggataggatggttggccagtgagccccagggttcctcctgtctctctctccccagcatgtgccactacaacctgcacttttatataggtttgggagagctccgatccttgtgcctgcaaggctagcactttgccaactaagctgtctctcaagcccagaaacttgtatttcaaccagagtgacccatgattttaacattttaactgatttgaggatcatttcaattttgatacatgacacacccttctaaataccctcactcattttcccaataggtggtcacctaaactcatagcctctcctgacagggactcactatcaccgtgcagggaggccgtctcatcagtgattacatgcactactactattcttccgtacagttactgcttaccatcctgtgtagatggggccaacttctttggacagaactttatattccttaggttactggttttgagtatagatactgttggtcttctgtaaaagtttaaagattagaaagggcacgagatggaacgggggtttgatggaacatgcattaatgcatgatggaactgcattagccatagagagagcgagagggggagagagagaaacggaagaacagagcagagcagagagtaagacagaagaattagtggtcgaccaccggaaacagaagagagagagggaaatgaagggagagtaagcagagagagagacacgaagggagagagagtgagagagaatgtggaggtacccgctttagaggggaagcttgcacatgtgtgctgatgcagcccataacatgtagccatgacgtggccacagggccctttgagctgcctaagtatctgcctgaatgccatatgcatgccccacccattgtcagggagcggggttagcataccaggttccgacagatacgttctaatctttgccaaactcactttccttatgtatagaatagatgtttttacctaccttgaaagagagattgcattaaaggttaaatggaaaaacaaaaacaaactgtcctggccagaaagattcttggatgtcatcagataactttttggggggaaatggaggagggtcagggtcttgtgtagcccaggctagcctcctgtggcagcccccgaactgctggaataataggcaagtcccaccacactccgccaaacatcctaaacagactttttttttcctttggttctaaacggactttttattgttgtcatttaacctcctcttcatcatgaatttttatttcttgctttaaaaaattgccaggtggtggttgtgcatgcatgcctttaatcctagcatttgggaggcaaatctcagagtttgaatccagactaatatacaaaatttattttttggcatttacttatttatgggtgtgtgtgtacaagtcatgccccagaatgcatgtggaggtcagaggacagcacgtgggaggttaattatctacttccaattgtcttaagcttatttttctctttccacattaaaaaaaaaaaacaatccatgtatggaatttactggtcataaatattaaagtgatttattgcaattacattgaaattgttgtcatgattttgctttttctattttgagatgatgcctgtgtgtatagctcagtcaggtctggaactcgttacacaggtgaagccgctgttgcctcagtctctttataaaacaatcctcatgtctttttcagaaaaatgattctgattttacgtgctcagttgttctctaggaatgtgggaaatctgagttcactggaagacaggcgtggatagtagaaggcaaaactagtgcatttggcccctctcatttgagagagagtcagtgtgaaggaatggggcatttacattacagacgatcagggaaaggatgcactttaatcatagatacttgtcttgagaatattggcactgtcattgttctgagtgtgtttttagaattgtctgtaactttcattcatgttgccagtctacagcaggaagcagaacaaatgttaattttatgaagtaactttgtatattgtcttgttgtgtgtttctgctttcaggaccggagtaggccctatgacacttttaacttgcactccttggagagctccttgatggatatgataaggactgaccacgagcctctgaaaggtaaacactaccctcccagcggcccgcccatgagtttcgctgatataatgtggaggaatcattttgcaggttaggaatattcatgtgtccattcttgcttggtgttttaagcaaaaatcagctttttaataattgtgatttttttttgtttttgttttttgtttgtttgttttgcttctgtacagcattgtggaatgtatttaaagttgatttgttttttttaacatgggttcagctacctgcagtaatcatagttggtaaccttaatctgtttatctggcagaagtctatgttgggtagctgagatcatggttacagcatgaaaccagaagccgcattttctgggctttgtacatttagaatccatagctgaactggagaattcatttaagtccaggtgtacctcaaggagtatgacattcagtaaatcagtctccaagacactttcaggaagcttcatagatacggctccattgtgttcgagtctaaccctttcctagttcaggggcatcgcaacacagcatacgtgcaactagagggtcctttgcatagtgtgggctacagaacaaggatgatgtcttaaagtatgtgcatcttctgagttcagtatgaggtaaaagcatgacaagatcaagaatagtaggacttacagatgccataattacagatggttcttttcaaaggttacttgacattttagagaccctacaatatagttttaaatgctgcaatgagagttgctggtatggaaatatccactccattttgagttaggactttaattaaaaactgaacactttgccacagggatgaccatcttgagcaaactccacatcttgctgaatcgtgaggactttttcctctctggcattcactaggcccttatctaggatgtgaccaactgaacctctgacatttgtttcctcccctcctttcaccattttcttgtcatgctcatcattttcctgctgcttttcttacgttccagtgaagagaataagtagtagtagacaatggagaaaatacagggtctagagaaaagctagatttttaaggccttcagcaaaagaagaaagaaaagaaaaaaatatttgctgttatatttagtcacttactacatttttcttcagttaaagattaggtctgtggtaatttgaagcacattatatttagaggtatgaatattgtaaaaatggtatttacagattattttgtttttagactcttttgaggttacatttgtcgatttttctataccatgggtagcctctcttgattattctaccacttaactcctgttctttgtctatacctcctgtatcttggtctgtattctctgattttccttctttcttttcttatcttttttttttttttttttgagacagggtcttaatgtatatagttcaggctgtcctggaacacattatatatcctaggaactcaagacaatcctcctgccttgtccttgtgagtgctaggattatataagtgtacaccattgtattctttcagtaaaaaattaggaagggaatttagagtatagcctctgcattaattttttagaattttatgtatactggtaacacagaagctatttgtgccaccttaagcatagcactggcataggggggtaacctcattgtgatgtaaataccttttccatttgtggtgtcctttttaaatttcaggccccactatctctgcagacttgactagcaaatatgaggtaaaagactgcttcaccatatgtgtattatggactaatgagttgggagccctttagtatatactttttaaagtctgaatatggtttcaacttcccaatttgtcacactgtacagactacttccctgaagtcagtgacatcactatgtccctgtggccaatgacatcacttgcacctttaagaaaatattttgacactgggcatggtggcgcacatcataatctcagcacttgggaagcagaggcaggaggatgatacaagctcaaggccagcctgagtttatacataacaagttcccagacacacagagctgtagagtgagacttgtgtccaaacaccaagaacaagaacaaagaaggaagaggagaagagaaaatgtgtaaggtatttttacctttaaaagtaaagaaaattgtcagaataaaaaggtggctaaaaagttgggctggagaggtagctcagtcttcaggctggagagagagctcagtttgagtacttgtgttgcaccatgatggcctgagctcagtctcccaaacccagttaaaagagctgagattgctagcatgtgctggggagagataggcagaccctgggcactcacttgatgagttccaggccatgagagaccccatctcagaaacaaacaaaaactaaaactcaactaaaaacatgtggacagtacctgaggaatgacagcagagattgtcctctgttgcgtctctacctgcacacataggtatctgcacacatgaacgtgcatatatacataagtaacttaaaactcaagaaacattatgatggtgtagcctttagtttttattttctataataataaatacccatggttctcactgatacttagaatttattgttaaaacttaaatttagactttccagtttttctttatcgtaggtaatgctgctgtaagtttttcttcacatagcttttgcttaagacacattcatagtgatggtctataggtccaaagatagaagcatggggggggttgagcattaggggctagatgatacattagggcacctactgtgtgctaggaagtgttttgctctcttccatcttgttttctttccttcctaagtatcctccttagatcttcagtcttgaccttttcctgtatgaatgtaggaacactgtgggatagggtagggtagtatagggtatgtgtgtgcttcaaaactcaagtacagagttggatttgggggtacttgtttgcactggttatttttcttagaactcagttttctttaggaaaaatcccacattctgcttactataccaaaaaattcaaataatacatagtgggtcaaaagagagaattaaaaagcccactgtaggcacaatacttagaaatagcaaagttatttagtcatctttattaagagcctcccagatttcctacatattctgtatagcagatgacgtttcaaaaggcaacctttctaacatcgtagtcagtccaaactggagctgagttctttatctgaccctagttggctattgaactggacacattggcttctttaaagccttgtaattaagataaaacaagttacataataggtgggaagatgaaatccctggcacaaagaactgtgcagatactgcatgggattttctgttgaggtgagtgtggcttattcctttaccttcgtaataaattaaccaaatcagtgcagatttatttcttgaccagactacagctcaatgttggctgcaaattgtcacagttgttttttttccatacataagtagtgattattggagggtaagccatcattttcaaaagccacatgtaggagaaagaaaactgatctaagttactgaataacatagttgtcttagtcactgttctattgctgtgaagagacaccatgactaaggcaacttatgaaataaagcatttaattggacataacatgaacaaataaatgacccagagactgatatttgggttcaaactgcaagctgaatatcagaaaagcaaagcagctggtcactagcttcttacctctacctcaggctgaatgggctgattctgtctccatgagctcttaccaagcctcagactgtaacctctcctcagtgtggctggagaatgaatcctctactgagaccttgcttctgtctaatatacttccctaatgttggcattaaaggtgtgagctgtaattctcctttagactgattcactcttatgtagatctgttgtggccttggattcagagatctgtctacctcttaatcctgagtcctaggattaaaggtgtgtaccaccacctcctagcttctggctgctgggattaaaggtgtgaatcaccactgcctgatctctatagcttgaggctgactttgcttttctgaatcctcaggcaagctttaataaatcataaatatcattacaactgggggcttgtttacagtttcaaagggtgagtccatgaccaccatgttgggcaggcatggaattggagcaatagctgagcacttaaatcacaagttggaagtgggggagaggatagagaaagaaagagaggacagtgagactgggcttggtgtgggtgtttgaaacctcaaagcccagccctagtgacacaccttctccaacaaggccacctattaatcatttccaaaatagttccaccaactaggtacctagcatttaaatgtgacataaattacctcttgatatacttaaaatgcacatggtgtatattcacagtggtagtcatatagaatatattagtatctgttatttaagaaatatttagtgaaaaatcattttattcaagaattcttttaattcaagaaaaagaaggaactaatatgagagcaggaagtttaggggaaaaaaaacttccctttcggtaaattagacatcacaggctttctgttgtgtttgtgctcatgttgggtctgtctagatgatgaatcacagaggaatggcttctgtgggctatgagtctatatagctttatggtagagcactgtgcggaagccgttggtgtgaatcccagcacacgtagcctgcaggaaaaaaaaatgccttctgttgcagtcactgcctaattcagtttggcggtgacaaagtgacaggataaaggagttgtggcttacaccttgtatgtcctttttgcttgagagatgcctcatattgataggacaggagggtttgagacaaatagaaagttgtgactactgttacttgtttctaagcacagaagtccttggattaacagaggtaggagtggtggagggaactgatctctatgcaaatccaaccctctgcatgactgtgtaggaaaagtggatttctagtgttagagataggaggagagaaaggaaaaaagactcatcattgcactctctctgaatgagcctgtctcctggcttgaaaacctgtgttcattaggcttgattggccagtcaccttccgtgttagaacaaataaggaaatagcagccatatgctttggacagagtagctgattgctagacagcaagatcccatcctctggctggggaaacaccgtatgcaggcagctaggcaacaacatgaagggagggtacctgtccttcatcccctgcatcctcactcatataccagggtgctagtctggctgactggggatagtgcctgaagaactgtttctatgtactgaattttctctccctttgtcatttgtggaactgagatttgaaagatgaaaagagcaggtgttggttgagcactcagatcgaagggcctgcttttcaaagatacactgaaaacgtctgagaaaaaaatagctcattttctggtactagtgcttcagcacatttaaattgacagaaacttggaagatatgaatgccacctctttgctgttatagagacacttttctctattcgtcatgtttagatgtaatatgacagagacttacacaaaattagttccctttggggaattttaggttcccttgttttttgtttttttttttaaagaaattttttttaaagaaatttttttaaaaaaaaatttgatcctccagaagaaaatatgctttttattttgtagcttgaatcattgcttagttttacttgaatgtcaacttctgtcaacctatgtcagtttgtcctttactaagtcagccaattcttagctgtgcttggagcacagtctgcccaaagcatctcagtttgattccctgcacctaaagtgaagaaggagaagacgaccctaaagactgctggagacagactgagtaaaaatgttttctttttttaccatgtctcagaaactgaattcaggtcattggtcttggaggcaaattttctcactgagccatctcacagccgcaagcttcaagcctcaagatctgcaaccctccttttcattgttttgagacagggtcttgctgtggagccaagctggtcttaaactcaagattcttcagcctcacccttttagacaccgactattacagacatgtacaccacatctgacttcactgtttctctaggagtgtatctctaactttttagagaaaatttagactattttcttgagcaaaacactaacaccaacattgtctttgtagctgcttaagtacctgactttttttctttttttagagtaaaataggtgattagatggctttggtactaattatgaataatttaaaaaatccagtttttattttggacacacaaaagtacaggtttatttgagctctgaaatttgaataactgtaaggcagattttaaaattttatgaagatgtgattttttccatcctaaataagcaaacataattctattcttcaccctctgtctccatcttctcctaattcctgcctgtgatgtcggcagagtggccaatctcagcctaccactgcatcatttaacttaggaagactaaggatgccttccagctcttgaaaccttatattttacactatacttgaacgatagctagctgacaagaacactttaaaaatagcagactcatggacaggtgacagatgtcacactggcagcaccaggctgcagtaacaaaatcaccagatgtcacacgcttagtcctgttttcacagctgattcaacagcagcatttgttggacaaaaggaagcaaaaagaaattgcctcctctgaatttagcatcagggtttcttttgccactacttgctttcctctttcttccaaaatcctgttatcagtattaaagtttaggtgcatgttgcactaagaaaaaattatataatgatcacaatcttaggaaagaaagcttcatgcatattctctatagtgaaaagtataaataaaactgtgtttgtctttaatcttattttttcatatattctaattttattcagtgaaaatagattgcatttatcctctaaccactacttttaatttttaccaaaaacattgtatttagtaggaaacctagattatatcaggttatagattctagggatccagtattgatacagaccgttttacaagatttatgttacttttttatccaaagatccactgaaaaaaaaaaataggaagaccaggaaaggtaaaaaaacccactgggtttttgttttgtttttaaatagcactgccttccacctgtaagactcccatctgagcctcttgctctgttttttaagaatacagaattgcaattacatcagtgaggatagagatgaaatgttctagctcttcaagaaagagctcaaaatgctgtggagctgtgcttagctgttctgaagctaagaggacaacatttcagaaacatagaaaccttatttggtgcgatgtcagtgaagtatgtaattctctattatacaggaagtgaagttgaatgaagaacaactaaatttggggttactcagtgtccttgacatctttccttattgtaataattttaaggacccatactgtcctctgaatatttattggccaaagatggaagaagtcctgtttttcatgttttgtttaaacaagatcttactgtgtagccctgattggcctagaattcatagagatcacgtgtgcaacactgtctcttcgttttttttatgtaattgtttatttttttgagatggtttcactgtgcagctcaggctgactttgaacttgtgattcttttgcctctgcctcctaaatgggaaaaaaatcaagaaagtgtcaaagaataataaagaaaacattctttaggtgtttaggctataggtgtgagctgccttctaactaaagagattctatttgccttaatttctaatggacagtgagtttgaagtctcgatgggattttatgtagattttctagcaactggctattatggttgataccctagaatatgatgaagctaaactagagaatatcacttttagtgttcatgcatgttagttttgggtgtaaagaacattgatttaattaactgaaaccagaatgtaaattattttactaagtctagtcttgttctggtgacaaatttttgtgtagtagttttcattaaggtgatggtagagacagcattgcagatggcatatactgtaactctcagagattctgaaatgacctaggaattaggaaagcatagtaaggcatgtgggacaattacaagtatagttatgtcaaatgcgttttccaacaatgggatattcttttaactcctagtaattagcttgtaggtaatgtgaaaaccgttttctctagaaatcgtatattcaagaatgttttctttattattctttgacacattcattgatttttttcccattcttacacacacacacacacacacatcaatacaagtggcaaagttgagttgtgttttttctttaagttattttgtttttctgtggtcttgagcttgacaatgtttgcctccagttccaatagcagaatttaataccaaatgaaaactggtccttttgcaattgcatatagggctgtatctgttgtagggaaaaatcagaaatctctatctccatcttcctctatactatttttccccaaatgtgatggacatttacttaagcagtggctataaaatcaaatgaacatttttagggctgtagggatatctaagtggtaaaacacttgtcttaaaattaacatttttctgtggatttcatgataactctcaaactaactatacatgaaaactttacagagtcggatacatagatatctttttgtgtgcttgtatttgaaacagggtattactctgtaactgtagactgatcctgaattcccaacattcctcttgtctcccaagttctggggttacaggggtaagccaccacacctggttttgataactattttgttgaaggaattggtcaagaaatcttgcatagtatattttccctctatacaagactctttgggtttaattttagttttttgatatatccatcttttttgtctctaataatgaaaaaagcagcaaatacctgcatctttcattctataccccttcgtcatctgtacttgagtctcactctatccacctcctggacactgccccccccccccggcacatacacatcttttactctttattccaatggtcaattagctgaaatgtctgattctatttactatcttatagctcaaggcttcaaactttgtgaaggagtatagaataaatatgttagagtttataggacacagacttctgttacctctttgcttttctttggttttccagcccattaaaaatgtaaaaatggttcttaacctcagaggtatatacaagtaggaagccaaccaatgtgggcagaagtttcaattttcctattattcataaagatgaactctggaaagtcacatttgtcacaaggtcgtaagagtagttagtggtggagccagacatggatggtaatgcatgtttctaatcctagttcttgagggaggcaaagacaggcagatttctgtgagctagagaccatcctggtgtgcatggtgagttctagatcagccagggccacataatcattaaagaaaacaacacaccatacaaaccagacccctgaaagaggaagagtggtagggcaacttgaactcttaaatttttacatcattagtctttcccttactgtatatttgcataaaatttaccatcttccttccttttgctactttggtaattatgttgcattttttgaggcattatgaaactgtatcttactatctctaaacttcatgtttatatacttctctaaattttttatgccttaatttgaaggccataaataaatgattgtttaaacaaaatgcttatctaggaaatggacttgtttaagttttaatatgggagatgtacaaatttcagactataatggaagcttctttttttttttttttttttttggttgtgttttgtgttgagagtttggctgtgttttaagacttttcatgtctgtgttttatgaattgatttaaaagttgttgtaaatgctttggccttgatagcattgctatggatgaatctgtagtgttttgtaatgtttatattttgtaagtatatttgaaataattatattgaacaattttgtgtgtgtgtgtgtgtgtgtttatgcttaatataaaattactttcttttccaggacgcatgggaataaatttccatcatccaggaacagataacattatggcacttaacagtaagtcctcctgtgaaacactctataaaacatatcagttaggtttgcaacactgtttcatctttcactgggtgtagtatagattactgttctatacaggcacttctcagagtggtatttctgttccagtagcatcagcattacttgggaacttactaaaacgcaaaatctcagggtctcctacctatagaatgaagaacattaaggatggttccagaaatttgtgcattagcagtcatgcaaggtgattctgagtaagcaaaagcttgaaaactcattgcgccaaaccaacattggcagaatgctagcctgtgaactggcttgctacctgtgtttgtaaataaagttttaagttagtaataggaaatgtttcccagctcctgctctctaccattggggtgaagtaatgaaagaaggacgtatagggaaagagagagtaaggtaaaaaatgaatgaataaataatttttatacacaactccaaatattctcattgttgtaaatggcccataggcgtttcaagagggatattcagggctcttccattgatgaaatttgtatactgtagatgtcagcagctttgatggtccgatgtggctttgtcaatataattttggggttgtattctagacacacacacacacacacacacacacacacacacacacacacacacacaccacatactaaccagaatgttactgagttgttcagtggtttggagaatcaggggtattgacacacacctgtaatccaagcacttgggaggtagaggcaggagttcaaggtcacgctggctatgtagagggtttgaggcagcctaggctatttgagactgtgctttaagagcactatgcttgaatatttcatatcactcattacacacaacacagtaaatacttatgtaaacatgtatatttgtaaggttacaaagaggttaaagggctccagcagagttcaggagttataacagaggcagagagcagataaaagatagaagcagcccttgcgggagttagagtcaatagaaagtacccagttggtctgtcagaggcacatagagccaagccacaaggtctccagatagggcagggctgcagaggtaaggtgtgagaccatcaaggcttaagataggagccaatggacaactgataaaggtgggagggactgaggttctagtatgctgtgtcaccttccgggtgatagctgagatgaagccttagggacagccaggagttctcaggctatgggtcccttggtgcacaactggatggtcaggtgacaggccagtgggggctgttgtcgtcacactgttaggtgtcctcctctttatgcaatgtaggtgaagaagtgtcacttgtggtatgtctcataaattcctgggcctggtttctctgatccagtgtttgggtggcacctgtttttgctttgggaagagtgagttgcttgttggtcttcctcctgggtggtgctggacagatgtggtgtctgtgtatacagagaggtgcagaatcaccctgctttgtattagttctcaaaatggaacccactgcttcttgtaaaatgaaaatccccagggtgaggcataacttagagcagagaacagcgtgatctcaaaaaaacaagagtcatgaggtatctgcccggggtcagcttgccttgctgccatttatatgacaaacaactttgcaagagaacctacacagaaatcgtatgttgtcaggaggcctgtacaagctgttgcctctcagaattgcagttctctcctctgtcaagtgagtgataccagtttgtgacctcttacccctcaggtgtgcagggcaattcctggttcacgtcggggacataccgagtaaaagtagggctgtatatgttaatcccctttcttcttgagtaagagctttgaaataccattggcatttctaaagataggctttagattctctaaaatatgtacaaatttaatctaaaatattacatattttctcggatctgacacgctgcacttaccctgatcatgtgggaattgctggccctgcttggtgacacaagccctatgcatgtttcctgtttggagggccttgaggacaatacaaattcctcttgaggacaatacattccaaagtatgctcctctcatttcttatttctgaaagaaaggacactttaaattgagattatgctacgtgtgtgtgtgtgtgtgtgtgtgtgtgtgtgtgtgtgtgtgtgtgtgtgagagagagagagagagagagagagagagagagaattgataacatgcttagctgagcctcattagtaattgtaaggagacttgattagatgatgggagttagagttgaccatgaaagaatagtgtgttagtattgtctgcctgaagcagttgcttagaaatgacctaatttgacatgatgtgaattgtcctctgtaagagggagaggatgcaattttttaatgtctgagaacaaaatgaagctaaaagacctttttctcttcaaaagattttgattacctttggtttataaaataagagatctcatttatgagattttttaccctgtacatgtggcttgcttaaatctcccttttagcatctattgtatctcttagaaaaaggaggctgattaggtaacatttttaaaggttttttttattgtgtgtgaataacttgtgtgatggtgtgggggtgtgtgtatgccttggcatgggtgtggaggtcagaaggccactttgtcgatgtctacgtcacatgttgatgaactgtgtagataattggaatgtgctggcagacaagagtatatcagtcttcacatgcttctctgggtgttcccagggttgacgagccattaaaaaacaacagagtttcccattaattagcactgcttacagtcagtgctctttcacagtcatctcatcttgacacggccataacccactgtgggttgtattacatgtgggatttgcatactgtaacacactgagcccacctcatctactgacacgtatgtaacatgtgtggacatgcttgtgtgtgtagcatttatgtagaaaccacattggcttggaagttgagattctcccacctctacctcccaaatgctgggattttatgtgccaccatacatagttccataatttctgcccttcctaccccactcctcaaataacccaaacttggtttctttgggacagtctgactagctcaggtcagcctcacactcactagccccacttataactctcagtatctctgccccagcccactagggctggcattgcagatgtgtgcccgaagcccagcaacacataggtatttttttgtcatcttctgttttcccccattattttttatcccaaagttcttgtcctatgaaggtcagttcttcctctccctcaacttctatataggaatgattgaaataaaattaaagatcactaaaatttatggtggcacatacctttaatcccagcacttgggaggcagaggcaggtggatctctgagattttgaggccagcctggtctatacagtgagttcaaggccagccaggactacacagagaaaccctgttttaaaaacaagcaaaacaaaacagaaatcactaaaattttactaattcacaatttttggtcattgaaaggaactaaatataagtttaactatatttttgaaaaagaaagggagtacctaagaaaacaaaaagaagtgattttgtgggtggtacacacttgtagtccctgcacttgggagactgaggcagaaggaaaacaggttgaagaccagcctgggccccacactgagactgttgaaaggtggggtggaggaactgtgtgactgagttcctcctttcttactctgcacaaagccaccattcaccgtgtccttctttcactctcacccaaactctcatctctcttgactggatggggagggagatgccagggtgagcatctgcccctgtcagatcctgtgggccactttcctggtttttgctgtcctggtgcgtgtcttccagttacttttttgtttgctttgtgagacaggggttctcagtgtatccctgaccaatctctagctcactttgtagacctgggtgaccttgaactcagatctgccttcctttgcctcccgaatcctgggattaaaggtatgcaccaccatctcctggctctcagttacatttaaccctgagaatcaccactgctggtgtcatccagaagactaaaaataaacttaggagagaaagaaaggacaccaggtgtggaaagaaggaggaattggcagtaagtctgtaagcacttagggtataggaagattggcaatatttgtataatgttagaatctgcgtgcgcgcatgcgtgtgtgtatgtgtgtgtgtttgtgtgtgtacacacgtgtgcatgtgtgtgtatgaacatgcatgtgggagccagaaaacaaccttggctatcattcttcaggcactgtccaccattttttgaagatttgtcatgctagcctggagcttgctgaagaaaggaagttgttgcggggccagttagccccaggaatctgtctgtgtctgcctcctgagcactggggttataagtattcgatatgctcaactcaccttctaccctacagtggttttcatgcttgcaaggtgagctgtttgctggctgggctcatctctctagcccctgtgactttaagactgtaactctagggtctagagaccaagcagctcaacagataggagtgcttctcttcagaagacccttttcatttccagcacccatattggtcaactcatagctacttgtaactccagccccaggggatccagtgcctccgaggacacctggacatttgtgatatccacccacacagacacaaacataaaaaataaagtaaaaacaaaaaattgatgggtggttcgagatgaagcttctctgtgtcactctggcagttctggaactttctctgtagatcaggctggcctctaaatcagagatccacctgcttctccctctttcgcgctgggattaaaggcatgcgaaaggcatgtgccacaactgccgaatcaaataagtaagtttttaactataaatctagtaagaattaggcctgtgtttgggctggattctgagacacagctaagaaagaaatgcattccttcagtgttgtacaatacaaaaggataaatggtagaaggaaccctcgttcatcagtaagacccactgcttggggggcgttgatggctcacacctttaatcccagcactcgggaggcagaggcaggccgatctctgtgagttcgaggccagcctggtctccagaacaagtgccaggatgggttccaaagctacacagagaaaccctgtcttgaaacccacccccgcaaaaaataaaacaaaacaaaacaaaaaaaacaccactgcttgtccagtatttccaaaataaaagtagttttgaaacaatgtgttctttcctctagagtgggtaacatttcccctgttgttgtaataattatccactgagccatcatctttatttttacttcaacaacactgtgagtttgcagattacatctttccctgctagaaaaggagggaaacctgagagtgcatctggcttcctacatggtagtgtcagtatcaggcaggttcttttctgactctatagtagcttgtggtttgcttttctacattgtggtatacatttgctttagcagttgtggtctgccatgggattgttgtctgacttggcgattttccctctatcatgttgattctcagaaaagggcctccgtaaatggaccaagtcaaccaagttaaggtcaaattcatgctcaaagccagattgctcagcgttagcttaagaggcatcgatgccaagggtatacagcttttccttttgactttacccggtttccagttggcttagggaaactggcaaatgtaaggaagttgcttgatgagtacacaaacaggggcagtgtgccttaaggggggtagagtcatttgcttccaacagccctctggcaagcatctgaaagcacaggaaacctgcccacataacatgtagctctaacacagcagtgggtggctatgtctagggtcaggcaaatctgaggtgtcacctcttacaagctttataacgttagggccttgtcttaactcctctttgtctctgattcttcacctgtaaaatggagatagtgatcatgaaaatggatgtcacacagcatagtgacagactcgtagataaagctgatgtgagctgtccttgcctctggttcttgcttcatttaaagatctcccttaatgtgcatagtagagttccaaaataggtgcttatattatattgattccttctatttttgaggcctctgtactcaggctggccttgaatttacccatgatcctcctgcttctgagttgttatgctggcttcttgttgttggtttttgttttgcttttgttctttgagatagagtctcattttgtacctcaggctagccttgaactcccagcagtcagtattgctgcctcagcctctggagggctggtaatataggcatgtgctagtatgcccagcatttaaaagtttttattgccattttattctgatatttctaagttgtaattaatatttgaagttagaggtgagtaggaaatctgaagtgccatgacctctgacagggagatgattccttgtccacactcttcctcctcacaataccccaggcagttagaaactgaagaatctcagaggaaatcctggacaatttgaaaacttaaaatgttaatatcttaaaagggagtggggatctgggagacagagatacataagaagcttgaaacaatggttttatctcccagaactataataagagacaaaacaacaacataataaccagaaagacattgagctgcttgagaagtttcagagtcattcactgacactgaaaatcctatacatagcccatgcaatgggccattcagaaccttagtaaaagcatcctccccttaaccaatgtcttaacacattttagaatgcctttctgtatttgtgttggaactgagagctgacggtgcatttgttgagtcaaaagagaaacatgaacaatattggtgtggctgtttgtgttgggcagattctgggggtggctgctttggctcctcatctccctccttgttgggctttgctgggtatgagctccttggggaggctcagctgagagaaagtggcacagagggagcagagcacatgatgcgtttgtgccaaaatagaaagaaagccagttttgctagagttcctaatggaagttttcaaaaatggaggagcacattgttgttatttttgcttactgtgagtgatatgagtttaaaaatattgtttgtttgttttttttgagacagggtcttgctatatatctttggccagcctggaattcactgtgtagcccaggctggcctcaaacttgtgtcaattcccctgtttcagcctcccaagtggtaggattataggcttgagtgcccatacctgattctaagaaaatacctttttgtgtttgtggggattgtgtgtaaacacaaacatatagcatggatgtcttcatcagtctcctcacagtttttgataacagagttttttactgaacatggagctcagcaattcctgtagattgtctggccagtgagcttcagtgatcctgtctcctccctctttctactcttcctactcccctcccccattccctggcacagagcgacagggttatagacatgtgctgctctgtctaactgttaatgggtcctggggactgaactaaggtcctcttgtttgtatggcaagcacttgtagggagtgagccctcgttccagctctgttctgccagctgctttccagtaaccacaaaaagacttaatattaattataaatgctcggccaatagctctggcttgttactggctaacagttaacaattaaaatcagcccatttatgttaatctacattctgctacatggcattacctctctttcatcttgtttcctctctgtctgactgtcaactcctttgactccagccttctttctagtgtcattagtctggttttcctgcctaacctatcctgtgcagctattgaccagtcagttctttattaaaccaatcacagtgacatatattcacacaatgtagaggaatattccacaggttcatatagtctaagctggtcttgaacttgctatgtagctgaggctggccttaaacttggtaagtctcctgtctctgcctccagaatggtggggtttgtttattttgagacagggttttgttttgtagccccaaatgtcctgggaactcaaagatatcccacctgcctctgcttcctgaatattaggattaaaggcgtgagtcaccataccagaagaaaataatttcagaggtaatatgatagtgaatttttctgagattcacaaaccaaagtaatttttttgacattttgaaaattttgtaaacaagatctctactgctgttctttctaaatctgagtagacttaggatttaaaatacaggtgtgatatgaacacattataaatgatggataattaaatagtaattagagagatacttgatgtttaacatgcatttgaaataggtttggatggatgctctaaaacaacattataaggggcctgagagtttcctttttatgttgctaagttggggtctaataaaggtttttaaatagggatcaggcacaagggttaagagaagagaccagaaacatggctgtaggcttctctaagatatcataacagaatagctcccatgtgtgggtctttataaatggataaactggcattaggaatctttgtgggacttgaccaaggtgacaaggtggaaccatgagcagagcttcctgtctccaacttgcaggggcttttttgcttcaaatatgtagttgagagtgagacacacacacacacacacacttacttcatggttttagaacaagcatacaaattcagtacctctgtgagaatacctttttttttttaaattactgtatgacccttattatttttttattttttttctgaaaaatagaatggacagtctggtctacattacttgatattggacactgtaaataagtttgaagttgtcccatggttttaatgggttttggaagagatcccttgtgtgtttgaaatcccacaaatacaggagttgattttcttcctcatagtaaagacacaggaaccaacacatttcttattgttccctgtggacttcctgtttgctttcttcccttatgtaagcagtgtatcctggacttcctgtttgtagcattcagcacacatgcaattaacttaaaaaaaaaaaatctcagagcttaatctgtaaacacttcaaatttcaaagaagacctctcacaatgccagttataactcagtgaaaaacaacacaaaaacatactgtagtgaagttcagtgatacagcagtagcccatcatgggcaaaactctggtttgattcccaggactgcaaaagataaaaatgtatgtgtgcgtctgtgtacattacacaaaggaagtcaacctttttgcttgtattgatgactggaaaagaaaaattcttatttttgtcatggatataatatgatagtgggcatttacaggatataatgtgatgttttgatgcattgtataataattcagaacaattagtatattcatcacttcacatgtttatcatttctttgtgatgaaaatattcaaaattctgattattgctggggctgatggcacaggcctgtaatcccagacactcaagaggctgaggaaggagggttgtaagttcaaggtaaggtgggctacagagcaagttcaaggccaccctatgttagtaggagggggaaaaaagagacaccagggcctggggagacagctcagttggtaaagcgcttgccacaaaagaatgagttcaatctccaccacccacacaaaaacttgtaatccagtgccagggaagtggagagatagtgggatcttacttggagcttactggctagccagcctagtcaagttagtgagccccaggccagtgagagtgctgtctcaggaaacagtggtggatgggagggacctgaagagaaacatctaaggtggtactctatcctccaaatgcttatgtttccccaccccccatatacacatgagtgtgaacgcacacataataaccaaatcaagggctggagagatgcctcagttggtaaaatgcttccatgcaagtatgagaacctgagttcaatccccattacccacataaggtggagagcaactgaggaagacacctgaagtcaacctctattttctacacatgtgcacaccccatagcacatgcaagcacacatatgcacacacaaaaatcggttaagatgtatcaaagttcttatttaacttttctcaaaagaagacatgcaaattaaaaatagaactgtcatatgactgggtaatcaaacacctgggtatagatccaaaggaaattacaccttcatgcccatgttcattaaagtactattcacagttgccaggtattcatcaaaggatgcgtggggtatgtatacatagcagaatgctacttagccaaaaagtgatgaaatcctggggccagtgagctgactcagcagttaaagctactcactgccaagtctggcagtctgagttcagtcctggatctgtatggtagaaggtgaatcggttccctcaaattgtcctatgacctacacacaaataccttggcatgcatgtgtgcacacatacatacatatgcaatcagtaatataaaagaaatcttgtcactggcaacaccatgggtgaacctgaaaaaacaagttaagtgaaataagtcacagagagaaaaatactccatgggctctccggtttgtggtatataatttcaatattggtgtttctctttagtgcgtatatttcaacaaagtgaaaactagattttattcaggataggaacctggtctgatatagggaaaatgaggagcttcttgtggctggggctgttcccaaactcccaaagaagttatttttggtagctttcttctatgaaggaactcttgtttctatatgagagatgccttgctagtaggcagggaacttggaacactgaccaattggtgctgtggactcctgaactcaccagtgtctttatgtttgtctgttcttttaattccctacgttattttggggctcataattgtagaattagcaagtattgactttcccaaataatcaaaaattgaagatttatataaagtttgaagagatctcataagatttttggcatagtgtctggagaagatggtttgttgaaaacagagctccagtttttgtttgtttggttggtttttcaagacagggtttctctgtattgctttggaggctgttcttgatctcattctgtaaaccaggctggccttgaactcacagagatctgcctgcctctgcctcccaacagtttttgtttttgtctctttgagacaagattttagcaccatagcccagcctggtcttcaactcttgattctcctgcctcagcttagtggtgggacaaaagcatgtgccactatactgggtcaaatgctagctattccagtgcctttctctgtagtaagcaaattctcaggccaattaggtggctggatcagacataaaggtcagtccttggtgcatgatgagtcatcagtagatggccctgttttcatcaaagcgtctgttctacagaattctccttgtaagttatctcggcaatgctagtgctgtgcctgtcacttactactgagaaagacgaagcagaatcagagaaatgggaaaggagtttaaaatacccaagtaaattgtaacaatgtgtgaacatagtggataaagatgtgctgtttctatctgctctcttcatggtgcttatggagataggtatcttccctattattgtttgcctggctttagaatcactagaccagaagcatgtttttagccactataaaaacaaagaaataagaggagcatttgggtacaaacctcatcctcttgctctttgtgagtttacaatctaattaagggaataggaactttttggtcttaacctaagatcttatgtagaatttttctatgactcgtttctggtagaagctaatagacaacattagttatttgcgtgcgtgcgtgcgtatgcgcgtgctcatataagtgagcaaagattgtacatagggccttatgcatgctagaagttctctaccaccagctacatttgaagaacttaatgtgtggccttttcaaatggtgattttttttttaatgtttaagccgggtgtgatggtacatatctttaatcctagctctctggaggcagaggcagggtgatccctctgagtttgaggccagcctggtctatgtaatgagttccaggaaacaaataaaaaatcgttggaggctggcaagagatattgcagcagttacaaattgctcttgcttttgggggcccaagttctattcccagaacccaccatgttagatggctcagaactgcctagttccaggaggacctgaggcctccaccatttgagggtacctaagtacacttacatgcacacatgcacacaaataaaaaaataaatcctttgaaaatgcagttgccaattaaagacacagtgtctgttggcctgcggatgtagagcagttggtagagtccctgcctcgagtacagatgccttgggtctgattgcctgtaatcatgggtttcatgaaggcaaggcagcaaggccagaagttctaggttcttccactatataactttgagtccagctatggctacatgaggctctgtttcaaaatttaaaaatactgtttgcaaggcttgtttttttttttttgttttgttttgtttttttgtttttttttttttttttttttttttttttttttgttttttttttgagatagcctagactggtcctgggagttgctgagtagttaaggatgaccttgaattcttcatcctcctgccatctccagatcctgggatcacaggcttgttttgtcatacccaataagtaagggaagtttgttttttgtatatttgtttgagacaggattagaggggggaaaagtcaagtaacagtctcacctgtgatgacttctctgtgtatgttaaacagcttaaaataaaacacgacaaatatgcaagaaatccaaatgttaatgtagtgtacatacatacatgcaagcaaaacactcatcatacatgtaaaataaatacattttttaaatggtgataattagtaattaagttcagaaaccagatatagtggagaatacctttaatcccagcactcagtaggtaagggtaggtggatcttttgagttccaggacagactggtctacagagtgagttccaagacagccagggaatacacagagaagccctatatccataaaacaatagtaaaataaagttcaaagatcctaaaaatctctgaggaaactcagagctgataaaacattaagaaaagtagctggataaaatcaacgggcagggcagggcagggcagggctgggtgtggtggaacctttaattctagcactcaggaaggagaggcagaggatcttagtttcaggccagtctggtctgtatagcaagttccagggctatgcagtgagactgtctaaaaaacaaaacaaacctcaaatactataataaacccaaccaaggaaaggaaagacaagacttctagaatagaaacttttaagacatggaagaccccaagacaatcaagaccagtcaagtggggaaaggctcttgctgtgcaaacatagtgacctcagttgaccctctgggatacatgggaatgcatacagagaggacagctccacatagttggcctctcacttccacttgtgcactgtggcacccactgcctcctaagaataatgtagaagtcattgaaggaagtagtggaagacagaaaatcccccctgtgttcatgggttggcagacttagtattgtgaaaatgactgtattaccaaacatgatctacagactcaatgaagtcatcataggaattccagtggcatttttcccagaacatgaaaaaaaaatctgaaattgctctgagcacaaaagaaattaatcataaacagagtgatgctgtaggtacaacaatattctgcctcaaaccatattacagaggtatactaagaaaaatcgcatggtactggcacaaaaacaatgtgtagctagaataatataatggagacacatgatgcttttttgtcatctcagaaagatccccatgagtttgagggtagcctaggttactactgtgtaatactctgtcttaaaaaccagaacaaataggaagccaggcataatgctggccattgtcatcccagcgctttgtatgttcaggcagaaggactgggagttcaacatgtgtttgaactacaaaagacctagtcaccaaccaaacaaaccacatatagctacagttacctcatctttgacaaggatgtcaagaatatacataggaaaaaaggcagcatcttcaaaacattgtgcttgggaaagtgggtgtccacctctagaggaatgtaactagacccttatctatctatccatctatctatacacatagattcaagatggatcaaagactttaaggtctgacactcaaactgctgtaggaaacataggcagtgtatgggcacagactgtgcaaaggaaagcataggaaataatctcaagaattaacaggcaggattgtatgaaattagaaggtttttataaagccacacaaactatcaacagagtaaagagacagcctattgaataggaaaaacaagtttgccagctgtacatccagcaggcattggtatctacaatttgtacaaaattgacaatagaaaaccctcatccaaaatactaatgggggtagtgtattgaatgggcatgcctctcctcaaaggaagaactgcaaatggccaataaatacctggaaaagtgttcaacgttcttagccataagacaaatgcaaactacagctgccttgatttttatctcaccccagtcaaaatggctatcatcaagaaaacaaatgacaatagcctggtgtgatgactcatacttgtaattctgtcacttgagaggcatagaggtaggaggattgccatcaatttgaggtcagcctgggctatggagtgaaaccctgcctcaaataaaggacaaatacaaaaatgtgtacaaactcatatatatatatatatctggtgggaatgtaaatttgtgtagctgctagggaaatcagtatggaggttcctaaaaaactaatacttctgtatgtattgtctagcatctagcagtaacactcctgggtatatactcaaaagattctaagtcagcctcccacagagatcattatgtatccatgtgtattgctgccagcctaagtgtccattaatagataagaaaatgtggtacataggcattatagcatatgcccttaatcccagcactgcaaggcaggcagatctctagagtttgaggccaaccttaaatgtaaatagagtgttgcagggcaaccttgtggaatgataaaagagatttgttcattgcaggttgtaataaggttgggggaatgaggcaggggagagctgatctgggtaaccccttctcattgctgagtggagggaaagtaaagaggacaaaggtggaggtgacacagagctagaaaagaggaaagcaacaagacccatgagtggtttcagtgatgttgctgcaaagtctggagtcttcaaggaatgcattttcttcccttcccattaccctatactacaagtgagaccgtattttgatccttttcagtgtaaataagttttgtgacattttatgcctcaaaaatagatcaaatgtagttctaattctcatttgtttttataaaactggaggtttcaaatttaaaagatttcaaatttaatctttccattctgaatgtcattgtaggtagctggtgatagatgaaacctcaggttagctctgttaaacactagacctaagctgtggcaaagccaaccttcagaattattatgggctgccttgggcagatctagagctttgatctatctctactttccattttacagatgtaaaatgtggtattttctcctttctatgatatgatagatggtgagatgtgggaaacaaatggagagagtaagagaaaacttcactaagaattttacagaaaccaggctggggagatggctcagtggattcaaacacttgccaagcagagtgtgagaggactggatccccagggctcacagaagccaagcatacatgcttgtaatctcagcactcaggggagagagacaggatccccagggcaagctggccagcaagactagtcagactcataaactcttggtccaacaagagaccgtgcctcagtaaataaaaggctgagcaattaaggaggactagagaccagcctcaggactccatatgcatgtgctcacacacttgcacacacgtgcgtccacatacatgcgaacttgcatacatacaaaagttcacagaaacagattctttaaagaatgaactaatgacatataatttctatacattttcagggcatttgtgaagtaagagtgtgtgtgtgtgtgtgtgtgtgtgtagtaagaagtttggaatgcccaccatatgccacaacttttagttatttagcatatttttcctgtgagtgatgtctggtgttaatataatgttcaaatgaagatttacaagttattctcaagaagaagctcttatctatgtctgaaataaataataggccccaatatacccagtaaaataccttacagactcatgaatctctgtcccagcagctgtcacagacattagagttgtgaacagtgacttggcttaatgcttcatgaaggctttacccgttaatgttagcagtgaaggtggccagtgtcttcagattaacattcaagaatacttagaaaacatttgtgtgaacttttttttaatttctaaattcactattttgatacaaatacccatggttttcttctgtttacatgcagccaggagctatgggcggagacgaggtaatttttttttttttaatgagatcttttgcttgccaaactttgagtaagtatgagtatgtgcgtgtttatgcctgtgtatataagacggtaattaatgtatggtctgatgttctagcttaattattttagaaagtaattctttatttttttacaattacttattataattattgttaatttgttcttttagttataataaaactacagcaaagacaactttatctggaaggttttgtttgaatttttgtgactgagcatgaggaaataaaggccaagtgtatgtatttttcagccctgtatttctgtgttcttttcatatgatttagagggtaaaggctcagttagggaggacaatttttgattttactaagttgtctgatgattatcttttctgttgcatccaaaggcaagcttgtattttagggccccttccaaggtctttacttacaatttgtgtgtgtgtgtgtgtgtgtgtgtgtgtgtgtgtgtgtgtgtgtgtgtgtgtttctttaaagaggtgacacaaaatttgctttagtcccttaaaacctaacctaatttagtataactttcatttgtgtaatgctgtaccccttgagtatttccacatctgtaactatttacaaatggtttgaagagtagcaagaggaagcctagccaatgggaaaggtgggatttagggcgagcacctgggctgtgctcatagcctgtgacttagagctggcttcctcatctgaaaattatgaggtaatagaaccaatcttgtccaacttcataatgtccaaaggtctggttttaagaaaaggtgaccgtgtacaacaagcattccacaaatgtaagatctgtctgctgcttgctgtgtaacttcagattaaagctagagccaatattagaatctgtctctttgtttcatatttgctaatgtttaccttttatcagaataatgtctctgactttggttgtcataaagagaaaataatgatactaaattgatagtattttattatttattacacagtaaatattggataaatgaatattggctgaattaatgtatgtatgatgaaacattaattataatcatttttactttggggaaatttattttgtatattttgggtataaataacttttatttccataaattttatctatagaacataactgctttcctttagaacaagaaaatttacagatgatacataattacttttttgtcaaaaactttttcaagcaaggtagtatatatgcatggtcacttgcatttaaaataatatggtgatagtcatatttttatgtttaccttaatcataaagatgaagaccttcaatcgcatctcctatctttatatcatttggtatattatctcactgtaccattttgcacaatacttgtttcatgttggtggaagatgcaggcaggagtagggaataagcattgtctataggaagtaggaacctgctgacagcagacaggagggactgcccttccctcaggcatggatctgtcacttgtcaagacttgcctctggtttcttaggctttgccctgcatctcaattgttctcatttttgctgctccatctttgtgaaacatcacttggtctatgtcactctcactccccgctgacggtacccgtgacctagtactccccatgtcaccaactgcagcagcatctcttcccactccatcttcctctggtcattctatgtgcttggctctcctcattgccaagcactgaccacttatttgctgtcctaaatcttacttcactagtgtgaaccaaattcaagtctttctttctttctttctttctttctttctttctttctttctttctttctttctttctttttggtttttcaagacagggtttctttgtgtagctttggagcctatcctggcacttgttctggagaccagactggcctggaactcagagatccgcctgcctctgcctcccgagtgctgggattaaaggcgtgcgccaccaacgctgggccactttctttcttttttaattacttcgttttttaaaattgttatgtgtattgcccccccctctctctttctctctctctctctctctctctctctctctgtgtgtgtgtgtgtgtgtgtgtgtgtgtgtgtgtgtgtgttacaccttgtgtgggcctggtacctacagaggccggaagagagagcatctgatcccctgaaattggagttagagatggtagtgagcttctgggaaccaaacctgggtccttgacaagagcagcaagtgctcttaactactgctgagccatctctccaaccctggcaagtattatcctaagaaaccctgcctggtggccttattggcagtattttcttctgttttctactaccttgtattcttcttgtctttcctttgtaccctgattcttcagctgaagataggttatttgagatcagttgtgacttgtgcctaacactatgttctgtatatagtcatattaagttcttatcaattaagatcattttgggctgggcgttcgtggcacacacctttaatcccagaactcaggaggcagaggtaggcggatgtctgtgagttcgaggccagcctggtctccagatggctggtctccagccatccattatgagatctggtgccctcttctggtgtgcagatatacatggaagcagaatgttgtatacataataaaatgaaaataaaatcttaaaataaaaaaatagaaaataaaaaataaagaattacttggtagacatagtggcacatgcctgtaattctaatgcttgggaggctgaggcaggagaattgcctcatgtttgagactggactggcatacatagaatctttaacattaactttcaggaatacttttcctctaacaagtttaatgtgtgctcaccctgctgaaaactagtctgttagatagagccgtgtaagacctttgcttataccctttctcctcttttctttccttccttctttcctcctcctcctctgttttttttttttttttttttttttttaaaaaaacagggtctccctttgtagcccttttagcctggtattcacggtatagcccaagggtttcctcaaacttatggcaatgcttctaccttcactatccccagggttgagcttataggtagatgctaactatactggcagcttacacatttaatgagtattgtaattttaaatttgacatgggtatgcatttttcagggctcagaaagacatttttttctacaggtagatagattaattatgcagagagagagagagagagagaggagagagagagagagagagagagagagagagagagacaagtgtttgtgtgtgtgtgtgtgtgtgtgtgtgtgtgtgtgtgtgtgtgtgtgtgtgtgtgtttttgctgctggtgactgaacataagtcctcatgcatgtgctagttgtgtgtatttgtttgtgtttgctattggtgactgagtccagtcctcatgcatgctaaacagttgtgccaggtgtgtgtgtgtgtgtggttgctgctggtgactgaacccaagtcctcatgcatggtaaacatgtgttctaccattgagctgtacctccaggtctacaccagtattcttgatgttgaacaaaatttcttggttacacagcagcaaggaaaaatctaaaaatttctatttgagcaatataggtgagcaaatacaaagagtggttgggccgggcattggtggcgcacacctttaatcccagctcttgggaggcagaggcaggtggatctctgtgagttcgaggccagcctggtctacaaaagctagttccaggacagcctccaaagccacagggaaaccctgtcttgaaaaaacaaaaacaaaaacaaaaacaaaaaacaaaaacaagaaaaaagagtggttggagttactattgtaaatatgtaggtcataaacatgtatgtacactaatggatatcttacttgattacaaagttctaaaattcatctttctgtgccaggccagctccgagagggccttgcagctgtgctggtgagaccatggtactagcctggcattctgttaatgcaaactgagttctatgagcttgtctattgaaatatgcaaataaatggttccggagtgaaaaatagtcatgagttgggtttaatgttttgtgattgtagtatcttgattgctattggtcagtatagtaatgggaaaatatgaacacagagagagtgacaggaatcagatcactcatttttcattattctgagaaattggtgtgggagtatccagaagaaaaaatgacaatgtcgttctgggccttccactcattctgttcatcaagtgtttacatgactacctggtactagactccagacatggtttctcactttgttcggagtttgctctggatagggcagaggtgataaataaatgagacacatatttttattcatttgatgaaagccaggggttggtgaggtgacttagtgggtaaagacactttctgcataagtctggtggcctgaattcaattcccagaccccacataaagatggaaaaagagaaccatctacactgcattgtcccctgattgtcaccatcacccatgagtccacaaaacacaataatgaaagtaaaataatttcttaaaagcccaggcacagtgctgtaggcgtgtaactctagaactccagggcagccttggctacttagtgaattccaggccagcctgagctgcatgaaactttatctctgccgctatctcccctctccatttgtttttaagtaccatgctggtaccatggtctcaccagcacagctgctaggccctctgggagctggcctaccagaggaaggaaagaatggacgattcctatttcagtggtggaggtcaggtgatattcaaaataaagcacaaaggacaaggagacatttggggctctttgttgagataggttctcacctgttataggctagcttcgagcttatgtttccccaatctccagtctctcacctatagtattaggattgcaggcatataccaccatgcatggctttaattttttaattatgaaaaatttcaaacttataaaaatatggaatagtttaattagagttctcctctggtctctgcaggcaacaatcatgcatgtattgcacatatatacatctaggtaaaacacttatacataaaaataaaaatgaatgaatcttttaaaaaagggaaggtgggagaaatggcttgtgcaaaaggctttatgcaaagtagtgctgtacaatacaatatatgtataaatcttgaaagtgttatatgccaagcaaagatgacaggcacctatcacagcactccactcatctgaaatctggaagaggaaaatcagctgagatacaaggaagaatagtgtaaccgagaactaagtggttgtgggaagatggaacatgacttgtaattggctaaattatgaattatatgacatgtgaattatatttcaataaaactgttgtctttaaaaagactagaggcaaggaaatggatgaaactggtgagtgtaggatgactttggagggaggaaaggaatcttcctttactggccttttacttcttgtggggattttaagcctgatcaaagtatgagaggaaatctttacagggcctaatgattgcatttgtgtttcaaaaacaccctgtgctgcttgaagagggataggaatagaagagggttgcccagttaggagatgtcaagacaacaagaaatgatgtaagttaggttagtgtggtggtggtgaggaagcagagaaattaacaatgatgtattctgcagagaagaagcaaccaaattggaaggatgacatcatgcctatgaattgaatgtggcaagtaactcagaaggcgaccttagtgatgttagggttctggtggaagctgtggggtgaatgatagcagcatgacttgaaatggcagtgggagaaaagaagtttagggtagatagtttacttgtaactggatatgttggctcacacctttaatcttaacacgcaggaggcagagaaagaggcaggcagatctgagtttgaggacagcctggtctgtgcagtctatataataagaccctatatacaaaaagtaataaaaagaatttgcttgtaagtttatgatgcctaagatatatcacttttaatatgaagtcaactctgtttttgttatgtaagatttctgtgcagggcatagtggcatgtgcctgtaatcctagcactgagtatgctgaggcaggatcaagagtatgagaccaccctgggctacatagtgagggctgtctgaaaacaaagaagcagatccaagcacacaaacaaacaatgtgtttaataaagagcctggagtccccagagatccagaagcctttcatctggatcatctcttacaaagacagacacagataggggttctgtcttctccaaagttaaagactggagattaagctggaaactacttcagtttccatggagatactttatttatttatttttaggaagccatttctcattatcgtttttgttaaattcttcagctgatttctgagctgcttgcaagtttgagctgacaagcatctgaaattggacgtattggactagcagtgccctggagcagctggggttgtggcaggggcttcagcaagaactcgtgtttgaacatatttagaagcacggcatggccactggctttggttttcccatcatttgctgtagggcggagcttcctggggaagaatatcatgaagagcctccccttgtctactagcactttgtaggttacctggtactttgattcacggatcttttagttttaggtcattgccacattcatatattatccattcaatcactggatcagacactgagcgtatataccagaagcagaacatttagtggaaagccccatggccaagttagaatagtcaagaagcttttttctttcccttctgttgggatgttgtatatacattttctgtgggagtatgtatcttgaggttctaattcagatttatattatcttcacataggagcgtgattctcttaagacataatatggattgtataaagcattttggtgttggggaatgtttctcttaaagaaaaggaatgtgtcagagaggtgctagatagtgaggcaggaatgtaggacattcacatgcagtgtcttaagattttggttactaataacacatccagtttccctagggatggctttgtttgtttggatgctgtgtctcatgtagcccatccccagcacaccccaacccaggcactattatttgcattaaggcaatgtcattctggcctagataggcctgtgtattgctggcctcagacatgagattttcctacttcagactcccaagtgctgggctttcaggcatgtgccaaacagcccatctgggacaatttgttttgaacatggatgctttccaaccaaatgactgcatggataatagcctgacaagggttcaggggactactcagaataccagtgcactaacttaccctggtgggagtctacagcaacggaagcttcactggcctattggtcaactagttcacaaatcactcccacacattaacaaagtgctaaatgctgttaagagccaaaggcctgatgttctattctcagcacccacaatcaggagcatgactccagctccgggggatccaacttcctcttctggcatccataggtaccttctcgaacatggcaaacacccagagagatgcctggatatatacattagaaagtaaataaatgaacagtccttcaggagcttctgactagagctgaaggaaatatatgactgtcaggttgtgggaccactgtagcccacagaagtgctcctcctcctcttttatttttatttttatttttggaggcaggtctatgtagtcctagctatcttggatctctctgtgtaagcgaggttgacaatttttttctgctgggtcttgaacctggaactttatgcaaactaaaagtattctgccacagaaccataccttcaaccctctcttaaccccacaagttatgtcttttaagtgtttcctaatttttttacccgttagcacttgaggcagtcatgttacttaaagctgattgaagattttactatattttgatgattaggctctgctttccttgacttgggtgcttcctatgttctatacacttgacacagatctctttcagtggatgcctgctgcagacatgtcacttgggtggttcttaaattttagcataggaatcattgggatgggagtgcagattttgaagcctgaccatcacaaacttagattaggggatttggggattgggttctggaacccgtattcttagctcctacttgcagtcagagaaacatcatctatgtgttcactatttgcagtttgtttttttttttttttccccaaggctgccttcattactgaggcctgtagcactctaaatgctgttaataagacagaggctcgcttttaaagccttagaaagtctcttaacttcccatagccgattttgaaaactgtccagagttttacaactcttgcttttattttcctctggggaagctgtggttatgttggtcaccagaaacaaggttttatttgttcaagaatgtctcggatatctgccacttgttcactgctgtggttgaagacttcctcattgcccatctggatagtcactgatttcttcataatctcaactcaccccactcctccctgggttcagatttccagtggaggtgatagaagctactgtaggcttgggacaaaacatatcagaggtggcttagagaagtgatctaatacagcaacaaatagagttgatgggggtgtaattttttcagcgcatcagtgtaaaaagccagttttgttgagggtgtagctcatttggtagagtgcttgcctaacatgcatggagacctgggttcagtccccaagaccacataaaaccaagtgtgggtagtatgcactcaggaggtggaggcaggagaagcagaagctcagggtcaaggctagagagatggccctctgcttaagaacaggttagattcccattatccacatggtagctcacaaccatctgtaattcaattttcagggaatttgggacccttttctggcctctgagtttatcaggtactcgcttggcatataagcctacatgtaggcaaaacacctgcacatactaaaaacaaatttttaaaacttaaggtcatcctcagtttagaggttgagaccagcctggagtgtatgaaaccctatcttttttgggggatgtcgagtgttgagatagggtttctttctgtgtagctctggctgtcttggaacttgctgtgtagaccaggctggctttgaactcacagagatctgcctgcctctgcctcccaagtgctgggatcctatcttcaaatttaaaaaaagggccagtattagaatgaggtattttatttgggaaggggaaaatcatctttaatactaagtatagaacatagtcttgtgcaggtgaaagcaacagtagttaaggccgcacctgggggatggtcacatatctcatgttccagacccctgtgtttatgctcattgaatatatgctcacacagtgtgcatgtctttgtgcatactgtttgtttttgagatagtctcattctatagcccaggctggtctggaattcactaaagtaatgcaggctagccttgaactcctgatcctccttccttatacccgatagtgctgggattgctggagtgagccaccaccatggccagctttgcacacggtattgcttccttatgtattgcctcacatttaacatgttttgggtccctctgatatactctaaggcagaagataccatagtgaagattaagttggtccctctcctaatggtaattcgaatgtaattggggtggagaaacacatactcaataaaaccccagaaatgttaaggtgttgactggggaaagtgtttggagagagaagcataggatgttttgtatggatagattagccaatctaaaagcccagtgcagtttcatacaagaagatggctttgcagctgagaccaaaagaataaggactaactgtgggctgggagagatggctcagcagttaaagcactggctgttcttgcagaggatctgggtttgattcccagcacccatatgatagctcacaaccatctgtaactccagttccaggggatctgatgcaatattctggcctctgtgggtaccagggcacatgtgtggtacatacatacattcaggcaaaacactcatacacataaataaatccaaaagaaatgtttaaagacttaactatgactggagaaaggaatgcttagaggttagcaggaaccctgtgtccttagcacctgtgacaagggagactcaaaggaactctgtttgattggagaggtcactgagcaaggagcagcagcagctgtgtcaaggactttgtagttcacagtgatgttttcgtacttcatccaaaaggcagcagaaggtcattgggagcttttgcaatgagaggtatagggtgtgttgacgtgttgagattaatgttggaaaatcgctacttcaggcctgcctgcctgcttccttccatcctccccctcctccctctcttccttgtaaagcactgttgaattctttttttttttttttttttggttttttcgaggcagagtttctctgtggctttggaggctgtcctggaactagctcttttagaccaggctggtctcgaagttacagagatccgcctgcctctgcccctgcctcctgagtgctgggattaaaggcgtgcctggcagcactgttgaattctaagtagaaatctgtgaggaaaggttttccacaactatgaagaccatgagacaaggaaagaggtggtggtttggatttgacattaagactggagatggccagggattaaaggaaaattgtattttgaagcttgaattggtagaacttagtgagaaatggattttatatggggaaagggagggagaaagaaagaatatgcatatcagtggtaaatactaaatttctgcattgcattgggtatgtatggaaggcatttgttcttcgcttatgtcatgtgtagtatgtgagcccatatgtgcgtggatgtgcgtgtacgtgtgtgcaggttcatggaagccaggttgaaggtagccgacttccttgattattctccactatgaactttacacatttaggcaggatctctcacttgagcccagagcttcctgatagtgcttgttcagctggccagcttgcctcagagatcccctgtctctgcctcccacctgcaaagatgataggtgggccaccagaccatcaggcatgcataggtgctgtggcactgatctgtggttcccatatttgtatggcaggttttacccactgagcctttgtgttgagccattgtagatggaagtttctgtactgcctggtcccaccgcccttcagccccagataaacacacagatacttacattaattagaaactgtttggccaatggctccagcttcttcttggctagctgtctcttaattattaacccataactactaatcaacgtatttctacatgacctcttactggagaaatgtctggacctgttacttcttctgcagctacgtggcatccctctgttggcttgtctctgcctcctctacccagaattctccttgtctggtagccccgcctatacttcctgcctggctaatggccaatctgtgtttattcaccgactgataagagaaacatatatatatatataggaggatcatcttctcatcaggaatgctggagagaggcatctttaaatggaacatcaggaacttatgtgatagcattttctctatgggtctttggtcttttcactcaaactcccagtccaccaaattctgctgaaaactgccctcttgcacaccacagaagggacacactgtcacttgacttctcccagcacttactatttcatacctgtgtgcttcctgctccctctttggactgagattcctttgtcaggcggtactttgctgctcttggaaaaggattcatttcccctcaagtgagctaaaggcttctgttatcttagttctggttaatgctggagtgagttaatgcttctatattgcagaacagcattttgtgttctgagggtagagcagagcctagcacacgaagctttccatttctgcctcttctccaccagcttttgtcttttgcacatctcatagttctcgtgttggaattaagaggtgggagtagatattctgtaggaattgctgacttgaacgtgagcctgacactgagtaggcacgaggtttagagtgtggactgcatggcaggtttacttggtggctgtcagaaaatgtctgtgggaagctcattttgcctgcagttgctgcagatgtgtcttttactcccagtcatcaaaacaaacatcaagagatgagaattgactgtctattgtttgttcctgccaggctgaaaaaggataggtagcacaatgacacaaactatctgtatctttgtatttacactgcataaatatttacactgaataaaaaactctctggtgtctctctgtccccactcttggccatttatttattaactccaaacttcaaaacagtacctttcctacaccactgagttgcttataatataccatgattacattagaaacatttttaccttttggtaaaagaagtgttcaccatttttctaaggctatttatattctgttttttaatgttgactattgttatacaaaacttgggtttcagggaaataaagagggttgaataaatgggagggtatttttgtgtgtttgtgctcttgtttccctaaaagtgtgagggtttatcttagagggtttttcttctttcttcctttgtgcttcctgctgctgctctctcctcttcctgctcttccctcctccttttccttatcgtctctctcttccctgttcctctcttcctaccttcctgttaagctggagtgagtgctcaagacagtagaacctaatggaaagttttgccaggaactcacagactcagacagaattattttttaatttgggctttattttgaaatgccaaattgaaaataattgccagtcatggtggctcacacctttgatcccaacatttgggaggaaggagcagtcagatctctgtgaattgaggccaacgtggtctacatattgagttccatgatagccagggctacatagaaagaccttgccccctccccccccaaaaaaaaaacaagaaaaataactccatagggatttttttttttttttgagaggtggcatcactatagcgcatggaactcattgtgtagaccaggctggccttgaactcacagagatcttcccgtttatctgacttcccaagtgctgggattaaatccatatgctaccgtgttctgttttttgttttgttttgttgaatgattaaaaatacagtctagagaaatagtgttattagagtaatagtaacactattctgccacatctggatctagcattttcatttacatatcctgcccaatattgttgcgtgtgcttattttcaaattggaatatgtttgcatgctagggaaagcatcgttggccatgctattagaagagacatcattagcttctgtaaccctgaggtcaccatcaagagtagataaagaaatatataaattgtcctgtgtactttcaaaaatgaaagaacaaaaaataacctatagatacattcttttatttttttaacataatattttattctttaagaattttaagccgggcgttggtggcgcacgcctttaatcccagcactcgggaggcagaggcaggtggatcgctgtgagttcgaggccagcctggtctccagagcgagtgccaggataggcaccaaagctacacagagaaaccctgtctcgaaaaaaaaaaaatttatatatgtataaaatgtatttcaatcttatctctccttctactccagagcccacaacacacttccttcccaactttacatggttctcccccccaatagagtccaactagtactgcccatgttcataaggtgtgggttcattcacctaccaaagaaagatgcctctccctccccatgcagccatcaactgccaactgctcttcagctagagctgatgccttatgtgagtgcttcttcctctgaagacatatacttagtagcttcaatggaggctgtatgagtataattatcaagaaagcatgcatttttgatgtttcttccttagatattatttcagtcatttcagtgttgtatgtacacatggctgtacttagtgatctttagttaagtattctattggaaaagccttagctcaaggtactttatgttttgtatgcttcgcttggtacaatgggcttctgatagagcattgttctctaggaaagccattctgattgtagaaactgctactttgtttcaggtcggtcttctctctttccctttgaagacgccttcttggatgacagccacggggatcaggctttatcatctggcttaagttctcccactcgatgtcaaaatggggaacgagtggaacgctactctagaaaggtgtttgttggaggccttcctcctgacatcgatgaaggtaccatgcattcattaagaactttacaagagctaacttttgtgcattgtgttcagaccctgactcttctccaagccaacatcagtaaacacacattgaatgagataatgaaattaaacaatgacagagcaaacttaagactttggatgtgctgtggaaatcttcctaacaccgacttgtttggtcagtacagctctaatactaatctaaataggtcatggtttctttagaattgctacattaaaggtgtaggttgccacagcctgattttcctctagctgtctttgtatctatgttaatagattttctttaggataaatttcttaccattgctgatggaatgagaatctatacccagggtgttacaaggtcacaatcttctcctatcagtcaaaagtcaaaagaaagagataaaataattgagcttcaagttttgtatatatcttagtaaagaaggcagtatggagatataagagagacaattgacttttaaccctttaacatcaccaaatagatctgtctactttgttgtccttgttgctcatcaatagaattatctatttctaaagtaatcctagagattccatacaagtgtttatatgtatattttttcaacttacatttatttatttgagtggtggtggtatgcatgccatagcacagaggacaatttgtcttgctaccatttgagccccagggattgaactcaggtcatcaggctttgtggcatgggcctttatgcactgagccttctgtccatgaaattatatttaaaacattttctgcagctaccttttttctaaaaatagagaaacattcccattttttggaatctcctgtcttccttgacataaagatcaccttggctagcattagaattttcttccaaattccttattaagtttattggtagtaaaaggaaaggaattagagttagaaacattttttgtagttagaatctaataagcaggccgggcggtggagttgcacacctttaatcccagcactcgggaggcagaggcaggcagctctctatgagttctcgagaccagcctggtctacaagaggtagttccaggacagcctccaaagccacagagaaaccctgtctcaaaaagccaaaaaaaaaaaaaaaaaaaaaaaaaaagagaagaagaagaagaagaagaagaagaagaagaagaagaagaagaagaatctaataagcaaatgtactcccgagcaatggtgtttccctttgcaggttttacttctgtagatactctttaaagaaaaaacaacaacaacaacaaaaaaaaactctaaaaataaatgcaagggggggttgtaaaaagatatattttatgtttcttatgattgcaggggtttttttttttttcattttgctaaattccttctttgttttgtagatgagatcactgccagctttcgaaggtttggacctcttgtggtagactggccccataaagcagagagcaagtcatacttccctcctaaaggtaatggactcaagatgtcagcatgtctgtcggggccaggatgcctgacagctccgtataagacattcttacaagttcaatagctgttggtcccttttccctaagtaaaataacactgatcatcaatatgtgtcagtttcacttggagacaattccctagcccagagtgcactgtgtttgatgaccttggttttactagcagtgaggttttgtaaatctgttatagaggagctttttgctaagtttattgtttcatgagggggaaaatctagtgttttgaggaatgtcagcaatggtaaaatttagttttttatttgtatccctatagccatgtgatttttttattgttgttgttgtgttatttgttttgttttgtttacttttaaataaatctcataatcccagaacttggtaaaactagtggctaaaaaaatgacttcgtgtggtgtgcccattatgcacagctgtatggtaaggggttgggaggtggagaactaattagcaaaagatccttcaggcatcttgctgtgttaacttgtgggaggttctcccactaagctctgagggcacacagtatattgtcttcttgctcagtgttcgtcgtttcacagggaacatctgtgctgatgctcattttgggtgtgttcctacattcagataatagagtactttgaattcaagagaatgagtttctctttcctgttatcttctgcagtctgtgtttcggggatgtcattcaccttggaaaatgacttgtggtctattactgtgtaacattacccatcatgaggtgatgaagtcagcatcctatctctctatgctggaatcaaactccagcttaaacgatggaaggcgggccgctggcttcctgttatgtccagttcgttaggtttctttctctattacccttttcctcactctatatcccatgaaagaaagtcaccactagagagttgttgcttttaatatcttctcttaatttatttcaggcttttatttttttgggggggaggggttgttgttgcttttaagatggggcccacttcatgttgttttccagactgacagtaaactcaggtttttcttgcctcagcctctcaagtgctagagttatcgacacacacacacacaaccatatctatatactcagaacatctttatgctttcaagtttagcttatgtccgtccgaagataaaaagcattatagtaattatctgagagaatgaatgtgtacccccctccctgtaacgcgtgaactacaccatttaaagatgtgtatgtaaagatgttttcaggcctggttgtatacactggtcatctactgtttcatcagtgagtgattgtgttcatcatagtgtagtacatgtcttatgaaaaccatcctggcataaagctgtcagatgatattggaaaaataaaaaaatactaaatatgtatatgatcatgttcatataatcatcccaaatgtatgtccgtgagagatataaccattatgtatattttacttaaatagcctcctcattaatatgtaggttagcatgaaatttaaattttacatatgtgcgttattatattatgtatgctgatttatcatgtacatttcccccaataatattagcatatttttataacaaacctatatcattaattagcatagtttatttattcaagtctgttgatggtatttaagttgtttttgctcataaattatgcttctgtgagtattctcatgttttcatattttttatttttattttttgccatctggattttctttacatggagagaggtgccggggattgaaccctgggccttttgtacattggccctgacttacagcctaattattatctcctaggttgaatttctgttctcattgttattaacttggtttacaaaactaagtcttattgagaattcgggaaattattcctctttaatttttgccgatttatggttacaagtaacactttgcgggcatttcttttctatttcctatcatactgattttcttattttgtgaaatgtatatttttcccaataccccttaggttttgatttttttgtaaaaaaaaaaaaggtggtggcatacacctttaatcccagcacttgggaggcagaggcaggtggctctccttgagttcaagaccagcctggtctacaagagttagttccaggacctccaaagccacagagaaaccctgtctcgaaaaagcaaaaaaaaaaaagtcttttatattaatgatttttatttttaaatggtctgaagtagcccaggttggacttgaactcactatgtagctgaaaggatgatctttaactacagacatgaaccactgaacttggtcttataaggtcaaattcagggtcccatcgactttttctcaaagagacttaaaaatacaaatgtaaggcgtggtggctcaatcacttaattttagcacttgggagatagaggcaggcaggtctctgtgactttggggattcaaaggactattctgtgcttataacagctcctgcatggcattatgaatgatgatatttctagtaaactgtagggtaacatgtaatccataccaagggagtaaaattattctaagtatccagaagaagaaattgctgtgggctgtgtgaaatccgaacctctgggataggtagaagaaaggcagaaaatgctaggggcatcgtgatcttattatttaggttggctgatatttgctgtgagacaggcaataggtcactattttttgttcttaatctcatttaatcatcttaatttttcagggtaggcacctgtcttagttattcttctattgctttgaggaatcaccatagccaagataactgataaagcatttgattgggggcatgtctacagtttcagaggggccataattatcttgttgggggagcagacaggctggcagggaggcacggcacttaagtagtagtgagaacttacatctgatccacagcagcaggcagaaacagactgggcctggtgtgggcttttgaaacctcaaagcccacccctgatgacacacctacaaggggacacgtactcaacagatccacaccccctaatcctttccaaacagttccatgagccgggtaccaaacattcaaacatatgagcctgtgggggtcattttcattcaaaccaccatgaacaccatattattcccgtagtatagaagcagacataaattcagaaaagagtaatttgtcaaaggacataggtaggactggggtttgagccaagacagcatgatcttagaattcaaagacttcccctctaccctccagcagataggatcccgtgtatattacattatacttataaagtttgctattcagccaaaaatgaccttgaacttgtggtccttctgtgatacctcccaggtggtctgcctcccaggtgctggggattacatattacatatttgtgatgctggggatgtaatctagggctttatgcatcctggaaaaacactctaccagtggagcttcatctccagcatgcacaccctgctttgagaggaggggaatgtttgagacatggtctggctttgaactctataggtatctgaggatgaccttgaactccttaggtgctgtgattacaggtatgtgccagcatgtctggctatgagtcctaagttcttaattgtcttagtcttatttagaaataaggatatcacagaggtggacatgttcaggatggtctttaaggatgagtgaggtcagagccgtaatcatatttgagctgagtcacgtgcaattcctgttccacaacttgatggacaactattcatcttcctaaatttcatccaaagaatgaggataataattgtgccttaatgtggtctcttatgcttaaacaagaaattgcacatagaatactttgcataatactgttataactgaggctttatttgtttgagcagaggcatcgttttcatggttagttttttttttgtttttgtttttgttttggtttggtttttgagatagggtttctttgtgtaacagccatggctgttctggaacttgctctgtagattaggcagtccttgaactcacagagatctgtctacctctgccttgccttctgagtgctttgtgtgcgccaccactgcccagcttcatggttagttttatagagcagttatgaagacctaggtatttcgagaatagtgggaaaaagagatcactggttctggtgatggagtggtcatggtggcaggaggtttgacagcagggtgtgttaaaattcctttcaataaatggtattctgatgcattgttgattagagagaaaaccaatgttgatgatttgatgtccagttggtctgtccttatatctgatatgagaagagattcctagcgggcattttatttacagtgaggcctttgggagcagaggtaggttggagatgcatgagtcttttgttttgttttgtcttgttttgttttgttttgttttgttttgttttgttgagacagggtttctctgtgtagctttagagcctgtcctggcacttggctcaggagaccaggctggcctcgaactcacagagatcagcctgcctctacctcctgagtgctgggattaaaggcgtgcgccaccaccaccggcttacatgagtcttgagtcttctttttgagaagggagagggaaatgaacaataaataagtaaattttatagtaaatcatgaaatagagatggctgtggccttcttgccaaatacatagtattataaataattcccactaagtgtggtggagcagtagacccagaacaaaactgcagttttcactgaacagctgttagtttatgagcaataagactgatggtgtgcaacttatcatcgacatctttttgtttccttgtaggctttatgcatgtgcgtatgtgtgcatgtatgtgtgcttgttcatgtgtgtgtgtgtgtgtgtgtgtgtgtgtgtgtgtgtgtgtgtgtgtgtgtgtatgctatatatgtttgtttacagggctgggagtatatcagcttgatctcttctcccctctaatgtctaatggcttttgttggctgtctcacctattccatgccctaatttatttgattgctggcaatttagatcattagtcataatacttatgttcatgtattcatgcctgtgtccttttcgttcaagttgttttctttaggctaaattagaagctacttaactagagatgaaaatcttaatgactccggatttgatgtcacatggcttcccaaagcaatctctttgtgaagtttatgctaatttggacatctgcagcaagtttcctcttgagtttcaagtcagataaatggcacattgctgctgtgagctcacctttcactgctttgtttggcatataatggacctctgcagaagccaggggtcacattggtatgaatcacgtgcctgaaatgcctttttctctaagacctgattggccgaatcttggttgccttgtaccatcactgcttatcttagtagactctcatgagggagcttagggaccttgaggaccctaaggacccttgaggtcctgatgctcttaagtgctgcattacagatagatacctccttgcccagccccccagcccctgaactagacagcaaagtcctcctagagctgtggtacttaacttcttttgtctaaatttcccatagattctgagtagggtgctcactttcttcccttaggtctctgcccagatgtctgtcttgacctctgtatctaaagtagctgccccagccctccactccccttcataatttctctcttaactacagctgacttttctttgaagtacctgtgctctgttttccaaatgagagtgtaagagcagctgggaaagtctaactgcttagtttgctgtgctgcatcaagcatctccatgcctggcacattttccctccaatacatttcaaatggaggaactatgtacggttaggtgagctgatgaacaagctcattacttgctcagagagtagaagtctgtcaggttctagaagtgaaaagttccttaaagataccttactctaacccaacctttatttaaagggacagagagaggagaggcatcttcttattaatgtagatagtttttatcagactgacttggacctggaagataaatagttgatattattttacctgataaataaaggaaaagattttttcattcatttttgcttaagatggaagatgtgcttagattatttgataaattatgttctttctaaggctataattcatatagaaattagcaatttaaactatatgactcaatgtacattcccatagctgcttgaaaaccaaagtagccctcgtctttttccaagcccttgtgctctgacgttctcacataagctgaagtatttccaaagagttttcttcagcttgtcatgggtctgagttacctttcgtctatatcttaacgataggactctgcctccttggtggtacctcaccgtttatgttcctggataagctgcatcaaagtgagggtttttgttttcattttggttttggatagatcacagatactacagagctaccttaatgcagggagggatgtggctgtaagtgacaagaggatcccaagaagaggagctttgatgtgagctgatggcacagaggctatagccagggtagcaggcagctgagatgtgaatactgggagctaattctccattgctgtcttctaccatgagtcagctcaaatggtttcctgtttctagttgaattcctgaggggaagtctgactagtccagtttgtatcttaagacttagctataacgtaagttatcctcaggatagagccctggatttcttgactgcttaataaaggaacagctcggtttgcacagagctgcgaatgttctatctagggagataacctgtcacagcaagcttagtgatagatgtttagtatggcctctctcagtgtctcctggagagtgtctcttgtccagagttgctgccactggagttacaaaaagaaaaagaaaaaagaaaaaaaaaaaaaaagtctccctgccctaggctttctatcctggttctgcaggaagcagctgttcctgagactgctataatctcacctcttcggaggcagaatggagcctgtggagccatgcagaggaactagtgatggagagcagctgaactattgttggcagagacttctgggcaaacacagggcaacatccagtctcagagactgggcaggagatgctgctgaacccccccccccccccagatgcgccagcgaaggaggaggatgtaatccacagcttccttgagcagctggtgctagctttgtcaagccagggcagaggtccaggtgcacgccaggtacacaggagtggaaacggttactcggcatgatacaggatgacgcaagtgatgaccgaagcattaatcgaattaacctttatcagtaaaaaaaccgggagtcaagtctagggtaagaacctgaaatgaaagatcagcgaacagagagcagctgccagttgcttcctacctcttcggctcctgagcagttggccgagcgtttataattcatattcagcctctgagtccataatttgggaactggtgggagggagagaaacatccaattacagatgactctcttccgctgtcagtaaaacatgtgtgtctttattttaacatattattttttaaattctattttatgtgtgggagtattttgcccacataggtgtctgtgcatgtatgcatgatgtatgtgcctagtgccccaggaggccagacagatgtcagccgccatggtgggtgcttagaatcaaacccgggccctctgaaaagagcagccagttctctttagcatggaaccttctctcaagcaccatcacgtgtgcttccaagtggttgtttcagcttcgaccccggagcttttctgtgccatcaggctggcttgcctgccgaccttgagactaaggcgtgcagtgcagttgtgcaggtttatgtaataccgccacgatctgtgaacctggcagaaggcaggccacgtggatttagctccactttgagccagacagctaaagagattctgtttgagggataagaaaggggcagacataggatcttggtagcggtaatggactggagtgaaacaccttatttcattttttgttagttcgtctaaaatctcactttggaaagactggtttgcaaacgtcacattttttcctctcgtagatactttgaatggaaacaagtcagtgttgttctagtctcagattccaagtttttccaccttctgggttatgtaaactgctcagttgagaagcctagtgactttttagcatgtagtcactctttcacactctataataaatactttgagtaatagtcttttattttcctttcataaatgtaggtcttggccggtagtgctaacattggtgaattctgaatatattttattttttgttgaatatgttttaatatctacttgcagttttcatttcagggagtgattttcttgtgaaaacatggaaattgcactgtactgtaatgatatggtttttgtcttgtcctgtgtagacagatggagcagcttctatttttacttttgagatcatagtatatccccacttagactgtttttattagacacctgtcttctctgcattgtactaaggtcgaactgtgaatttgttttgtttgtttgtttgtttgtttttgtttttttgttttttgttttttgtgaagcttttatagtttggggaaccgtacaggaaggacaacagcattcagagcatatatgccacaggacaaagcttgagcaactacagaaacaagaggcagtgtgtatgaggtcacagtggtacacgctgtgcccaagaggaggtgcactaggaaagggcaggcacttgcttaatccagagagactgcaagcactcccactgaggactttgtatggaaaagagcccatttcagaaactgaaatgaaatgcaaacttggcaggtgaaggagaaaggatgtcttagcattggtctggacttgctgacagggtttaaataggaccaaggctgacagtgtgaccaagaaagagtatattcagtaaaaggactgaaaatgggaaactggggctaggggtgtggctcagttgctaaagtgcttgctgggcaagcatgagaacctgtcatctgtttgcagaaaccacataaaaaaatcaggtatggtcgcatttgcttgttatcccagcataggaaaggtggaggcagtatccccagggcttgctgggcattctgcttagcccaatgggcacactttcaggccaggaagaagcagcccaaagttgacctctggcttgcaaacgtgcgcatacacacacacacacaccacacaagggtggggagaagaagggaaggaaaacagctatgaggaactgtttaaaattatcaaacactgacagtgaacctgtgttgtcttccaaatagggcaggtgtctgtagtcttgaagaggagaaactgtcagagaaaatgtgttgtcagtcaaatcaagaactaatgtgaggagaggagaatttcgtgtgtcagtgctgtatcttctggtaaaacagctggccagttgtctggggatgaagaaaagcaacaagtagggggcaaacatcaggcatctggactcaggaaggggtgccaacaggttcccaagtattaatgacatttagcaccgtgcagtttaatctctgaactcacgtactcatctgtgttagtgtctcaggtttttcagattacatgagactgtgcacacaagcaccagcacaaatctgaagattgtgaggtgtgaaataatatacactccatgcaaatgtaatacttagtaatcattcaaatcacccaactggtttggtcagttccttctgcactcccagtctggattcagttttcctggctcaggtgcttattagaaccgacagtgacttgaacagatagactggcagacctcacaaggccctctttatacagagcatgtgtgattacataaccagagcttctaagcctaactctggaggtcactgccctggactggagcaaatacactgccagtcttcattttggggtgtttctcagtctccttgttttcttgttcattctcagatactcctacccatccccactcacggccagcccacagagaagcagtttattcgtgtagtcaggagcagagaatggtctggagccagtatatgtctcagctctattaaggtagtaaagatagtcaaagaaatctggttctaactccaaggggcatgttcaggactccaggaacgagagcaagtacattctcagagccatctatacgtgtgagcatgggctggtttcttcctggagtcctctgggtgttttcacctgtcaaacacaagatctgcctctgcattcagaacgggcttctgatttctctatcatctcctcttttttaagaatatgttttaaaaactgatatttagattcttaatgcagtttctgtttttaaaggacttaacaatattttttttttcaatttgtatgtatgtgtaccacatatgtgtgcctgtggaggtcattggattccctggagctagatggagttacaggtgactgtgagccaccctagatgctgggaacagaactctagtcctctggaagagcagcaagtgctcttaactgctgagccagctctccatcccctaatacactgtttctaggtgagagttctctatttgcccccatgacctcattatatattaatatgtaagttcctgtgcctagggcacataagagttcaaatcattttggagttcaggttttctagtcccccaggggaaaaaaatgggagttgtagttcttcagtgattgggcagtagacaggaatggtagggcggttcacataccagctgctcctttacatgggtctgaatgtggcctgtccatgccatggcctgctcttttctgaaaaacagtcttctccagctagatctgacttccactctgtaaggtctctggattggaaaatctactgcaatgtttcttactggtgttctgtaggacatacccacagcgccacactttccgtgttggcagtcatttacttaacatccttatgtacagccagtgtaaatcatagtgttcccagggcagggcccttctctgctgttattcatctttgtagagcccccatcatgctttgcacctcctagatatttgtggttctcttgaaatggatccaaagacaaacctcctgaggcaaaccaggtaagtcctctgacctgaaattcaaggtcagagagaatgtttgaaacagatggcttgtgtcatttttttttaaaaaaaaaaatatgagcacaggcagctcaggctgaggtgcccttcagattgctccaggaaggttgtgcgcagttggggagcttggattttgtgaggtgaggccgatctttctggggttgcactgacttgatcagaagcctatatgtttgtgggccgccattttatgaataccaaccaggacatagccccacacactgagattttttcttctcatttatggctgttacttgaagcatgcaaatgaccaataacattttaaatgcagatacaggtcatgggcagtgggtcagctgccatagggaccattgcttggatttaggaagttttcctgggcctccaaggcctggcagccatggccagttagttgctgaggatatcctgtgtgtgatagtccctgtgaaagagctggagtaagaagcagtccagcctgagactgaatagtccacaatgcctgccgagactaaaacttcagggcctaggagtctgctgtcctcagttggagagagagagacccagaggaagatggccattttaagacctactaatgggaggagctgttgaatgtcattgtggtcttttttatgtgacatgtgtccagaaatccacaaaagcaactacataaataggtagaaggcatgcctgttctaagggtccttagtcctcatggactaagaagccttagcagagcttgagttctgtccttgtgacaggcattacatcagagaggagcaaatctagtctttgtgcagactcagtacatatccaaagacaacatcttttaccttcatattcctagagacatatcgagtttatgttgtttatgttgtttcctgtgtgttcagctcaagcaccctgtaaatcaattctttgcagaagagattaaacaatttcctaacatctctgtagaggcattgtctgtgaacaagtagtaaatagttctttgtaattgtgtagcagctgccagccttcaggtggcaaccatgtgccagagcagtgaacactagtgttcctaaatgtgggactcaggagcttgttgcccattctcatgtaaaagaaaaaaaaaatgttacaggcgtgtccttagtgacattttatcttgttatttttagatgaggcagtgttgataatggataacaatgtccttagtgacattttatcttgttatttttagatgagacagtgttgataatgggtagcaaactgagagagtttccagatctggcttaggctttaactccaaattcagcccctagctttgaatctgagaattcctgtgaattcctcatctgttaagtggtgataatgacaactgaatttaccccacggagcctgtgggatgagatgagccaacaacttggcttcttagccaagttcctaggatgttttgaacacccaaggcctgttagtcactgtagtaagcttgataataattgctgtttatatgggggatcaaatacttaaaattataacatggaaacatatttaagaccttaggaagctttgtgtttaaaaaagaacattttaaaggcaattcctagtatgttcccaggcattagaagaaaaggtccttttaatcaaatttacccttcaaaaaactaaccaaataaaatggaattgcgcccttatgccttcctgttctttctccttaaggaaattgtgctgccaatccatgttcttctaaagcccctccctgtttcagccccactctctaacctgtttggtaccagggaaagctaggaatttcattctaactattctgtatggaacccagtggccacaggttcctccggagcccacctctcatcctccagactggctcagagggcttcccattgttcaccatgtcttagaagcccccccccccacctaagttgccattaccgaaactggaggcattttatgaacttgtgtctattactagattagagtacaagaggcaatggagtttttggctaaaacaaaacaaaaaattcaaactaatagaacctgccatcaaacttatggttatgcaaacagtatttacgggtataattgacttttattaaagggtatgcattaaacccagcaaaaacaactacatctgtctattctctcttggtagaaatggctaatgacatttgaaagcaggtattaaggctttttccatatctagattacttccatgtattgaccaaatactttgtaaatgccaggtagaaagcaatatatatcattaacttagattctaatttttatgaggtcatatattacagctcaactttaattttacacacaccataaataattagaaatgggggctggagaagtgactcagtggttaagagcacttgctgttctttcagagggcccaagttcaattcctagcacccccatcaggaggctcactacagggagctcctctgtaactctcatttatgggacccaacacccctggcctcctcaggtacctgcactcatgtgcacctagtcacatgcagacacacatacccatacataattcaaaataataaaaaatgcatgaagcaaaatcaacacttgtgtgatgctcccatttacaaggctcctttacatatgttatctcacaggttaatatcaatcactatgagatgaaaaggatctatgttgtcttcattttacatttaaaaaatacctgaagagactcagaaatgtttattattaaagtccatggttccaccacttgtgacctcaaatcagccacttaatcactccatataagtcactgaactgtgaagcagaattaaaaatagctcctacttcataggccagggagatggaatgagtgcataagcacaaagtctttatcagtgggtggtgtgtcaaaaacagtcattattaaccgatagcagatccaggcctcctgactcctagtccagaacttttcatcctaacagtagccgatagacatggtggtcataaaagtagttcccctttaataagaaaaaggctctgaagagaagtgtttggatccctagcacagagaaatgaacgtttgagagaggcactaattatcagaattgggtcactatgcattatattcatgcatcaaattatcatcatgtttatataattaccacatgtcaattaaaaattatgctgaaagcaaaatgtaaaggcctatgattgtcatcccagccctccagaagcagaaacaggaagatgccgactttgaggctaactggagttacacaaccagttctaggccagcctgattgatacagtcagaccccgtctcaacaaggaaatcacacacgccattaaaaaaggaaaaacaaagcacccccccacccccagttaatattgatgtttgctggtcaaagtgaagacagtaagtggctgtaattactccccgtagatgggacatctatatcaaaatcctttcccaccccaccccagggctcagagagcatccatccaggaagacaaggtgaaagaatgtgaaagcctaagggtggagaggggtactgtgaaatgctgtctgtagggagatgttgtggcccttgcactcatgaactcaccacagctttggttacctgcagtcaaaatcctgcacagtcttgggagagtctcacagggtcccaccccagatgaggagctattagcagttggataattaatttttcttcagctgtgtagccactggtagtttgtcaaggcttcagtggatgacgtccctggacactcatgggcaggcctaacaggactccgtgggttatggaaaggaagagaagaggaggaagggagggaggaggaggacagaacataagctggctggggagctgaagggagaagagggaggcgagtacagttaaaacacactgtatacaagtctggggtttacaaagaggaattttaacaaatctttaaaagctttaagagaaaaaacactgacatttggagattgtaattctgccaggagaatattccttggggaagcagcagcagtagctgtaaatacacatcggcctgatgggctgtttaaaagtagctttgggcagctataactcacatgctatacagctcaccaacttaatatgtgttattcagtagttttctttttctttttttctttattttattttattttttggtttttcgagacagggtttctctatgtagctttggaggctgtcctggcactcactctgtagaccaggctggcctcgaactcacagagatccgcctgcctctgcctcccgagtgctgggattaaaggcgtgcgccaccaacgcctggcttattcagtagtttgctatatattcacagatgtgtacaaccattagccactaggatcaattttttaaaaaaatctttatctcaaaaagaaactattctccctgccctctggttacaggtagccattatctggttttgctttttgttgtttgtttctttggtttttttttttgtttgcttgtttttttgtctcttctggctcttgtcagttagcacagtgttttcggaacccatccctgctgtgcacgagttgagtctcttgcttgatgggtggaaatgatatttattttctgactgctatttgtagcttgcatcatttagagtctacctgtcttcattagtgatgagaagacccattttgtggaaaatccatagaggtgtttgaacttgcttccttgagcagttatgaaaattaaacaaagtgatatcagagcacccagctatcacagtaacctgtgaattaattaagcaagataattgtctgtgtgcactaaactcattgcccagctcaagggggtctcaagtccatttccccatttgaatattcagggtttactaagaatttattaataatgaagcaataggtttcttaatctgtagctcacactagtttgtaactccttatgtagcttaggttagcgcatatggcaagcctcctgcctcagcctcctgagcaccgggattacagttgtgagcccccacacctgctatagataatattttcactatggctttgaggttgaagtactgatttcttccatccttttgttttgttttccccaaggctatgccttcctgctgttccaggaggagagctcagtgcaagctttgatagatgcctgcctagaagaggatgggaaactgtacctgtgtgtgtccagccccaccatcaaggataaaccggtaagtgatatgcagccagctgctgctttcccagagcacatatgaggatgactagctgttcctcctccttattatgaaaatgctgcaattaggagtctcttacctgggttaaccttgttatgtagagctaggactgttgctagtgatgagaagttaattaaaaagtactcatatctcatcttacacctttgggaccacaggtaaacaaatgtgtccttgacatccacttgcagcttagaaaccctcaatagaggagatcagtgttctgagtggttctggcagctcctttctgtcattatttcagatcaaggacaagaggaatttctttttaaaaatagcataactggtgatatttgcatgtccttggatgtaagactttatgctggattgtatccacggctacctggtgggtgggccagcaggtcacactctaaatggacagttttggcaggacagagaacatggcactgaaactgtaaacaaatgggtgtgataagtttgtatgtaaaggcttggtccttagagtgacaaatagtaatgaggaatgggcaaggggctggagctatatccagggcctagagcagccattgcagactctcatcagagacaccagggctcacttggttggctaagcatattctcagaaatgtgtctgcaaagagttgaagttagatgtagaaattccgagcttgagtcttaattttattatttatatgtaaatatctgcttgattctgagtaagccatcctgtccttggtgaactgtggtgttctcaactagaaaatgggaagaacagccgtccttccctgggtacttgtgcaaatctaactctctgtctggtgctatcagtcctgcatggcgctgtgattcaggacagcacggctagagctcagctgtgtggccacacctgctggcaagaacagggcttccgacttgtagaagaatgccactgggacttggtcacccataaggagtggaattagtatataagtaggtagaagaggaaattactacagaatggggttattgagtcatggcagaaaggttaatagagaaaaagaagtaaggattttagccactatgaaagtatcactgtgattgttaagttctgggaccattgccaaattttgatgacaataatgacagtgttgaatgctgtggctgtacaggttgggaaacagtaggtggggaacctttgttgactttgggctttatttaaaagtgtgtggtggtgtgggagacaggagtcactgataggaacagcatgtgatatatcatcggaataataaataaacctaaagtcacccaagtctttcagagtcatgcaagattagaaagtgcctaccaaatttggcaatgtgtcttaatagtcagtctgcagagatgccctgccctgggcattcagtgagaagtcagtgagagcgaacaaggaagggttatgatagaattggccgtgatgcactgtgggagaggattagaaacacgttttctgtttgaaaaggcaaagggatagagggacaggacgatgtaattatgtccacaatagagaacaaactgtagaattgagatgaggagatgagatggtcccagggctcagaagttccacatcactggctttgtaggggaagggaggagatgatgactggtagggaggccctcacctggacaaagaggagcaaactgatggttgaaaataattagtgccatcttctctactggacatgtttatgggaaactaactttcactttgtcttcacattcctacttgatcgcagtttgccttttctgagctggaggatttgtttcactgtagaatgataaattctaatggtgattatcaaaaacatgtttctttgacccaggcatactcagggtttctagcattaatagtttgaataaaacatagaaggaaaaagcctccctggtgatgtctctaatttgaatggagtacactttgtgtcaggttccagagcttttgtctccagttttgcagcctttcttggcattagctttccctccactatctccagcttcatcgagtcatgcacaccccagctcgtttggatctcccacagaaagtgacagctagagtcagccttcttgaatctgtaaggaccttaggagtaggcaagctcagtctcaggagctcatgcaccaggctttctcagctgtggttcctgtttgttccaagtcttagtcgggctagcactcaagttctatccttcaggattccagtgccctggcagtgatgtttagttctttctgactcctttgatttctccttggagatgtatcgggttccaacggttaccttgaagatttttctaccctttgtccttgtttattcctttccctcacatcaaaccctcttccagttaagtggatcaggttacaaagattgttttcccagaggcccatggtgaagtctgctctcagctatcttgtccaggatcatgcttctttttaacccaagtgaactctaactgatgggttttagggtatattagacaggtgatttttgttaagtggtttccttctattaaatgattcacatggattgttctgtgtatggctttggtcctgaaagatggcagaaagaactgtgtttattgcctgatggttttaactcattagtcccagagtgagaaagggaggaagggagggagggagggagggagggagggagggaggaagggaaggagggaggaaggaaggaaggaaggaaggaaggaaggaaggaaggaaggaaggaaggaagggcaagagcagcagctgttgtagtttcgagatctgtaactccttccttcagagagaggagcttcaccagtcatcagtacagacccccagcagatgacagttgttgaggaatatttgtttatactgtaaagatgcatctctgccttattggtttaatacagagctaaatggccaatatccaggcaggagaaactaggtaggacttttggggagaggagagagagagggagacagacagacagacagacagacagacagacagacagacagacagacggagggagggagaagaggagagactgggaagaggaatctagacccatggattcaccagctggagatggaaaaaaggtaatgccacatggcagaacatagattaatataaatggattaaattaagttataagagctagttgaaaacaagcttaagctaaggctgagctttcataattaataagtctctgtgttgtgctgtcagaccaaggactatagacagtgatgtctgtgtactacctgtgaagtagataggtgttaagaacagtagtccctatcaggaaggtgataaatataaatagacagaacccaaaggttcaaacaataaatgatagagcaggagacctggatgctagatggtgactggagagaaggaaggagacattagatgaacattgatttgtctgggtgccagggtcctaccatggaactctggctgacctgtatagatcaaccaccctgaccccaaattcagagatctgccttccttggcctcccaagtgctgggactaaagacacgtgccactatgtccagcaatgatccttccttttagaacagattgttccaagttgatggaacaggaaacactttgaaaggaatttaaatgttattaccaagctggatgtgtgtttgtgtaggttaaggtttttggactattgcacaggtaacatgagcatccacttaaaaatgaaaaacaaaaatcagtaagaaaaatgatagaagggaggaaactggaattagatgttgcctgctgtctccgttttttaatgacattttaattgacttgttttgtgtgtgcatatgtatatgtgtgggtgcacaagtggagttggctctccccttccaccacgtcagtccttcagtggaactcaggtcatctgactgggtgcttaagtgtctttactgctgaaccatctcactggcccattgtttcagttcttaattctgtccagcctgtcattccagtctctcttgacctacttatgtgcctatcagtgggatttccagcacttttagtcactcttccttagttagagaaacagtccagatttttttgcctgggagttaagagctttccagtctagcttcaattttccccaactttaccatctttgcttttcttttgaccttcatatttatttatttatttactttccctcttttcgtgtgtgtgtgtgtgtgtgtgtgtgtgtgtgtgtgtgtgtgtatgtgtgtagtgtatgcatgtatgtagtatgtttcaatatgtgtgtgtttgcatgcataaggaggcataagattgatgaaaatctttcttcatcacttttcaacttactctttgaagcagagtatcactgtcaaacccagtgctcaataacaaggctagcttgctcgcctgcttactcagagtcctcggttcctactttctgaggctggaattctaggcaagctgacatgccagcctggatcctgtccatctgagcaccagtcctcttgattgtttggcaagcactttaacttaatctcctaccccctttaccctcatattttaatcaaactggaatatttttgcttctgtctcaaggtcagattcctacccttacacccaaacctttatcaagtgttatgtatttcatggatctttttgattattttactgtctctaacaagctatacctagtataatggtcatcaaaacaaataaaaagcaaaatctcccaaaaaattaaactgggaaaaataagactgttatagggcacctggattgactgcttcatctttctgctcatggcatatctactaagatcatgtgattcatgatccacctgctgcctactgagccctaactttaattttggcttggctcatttaaatctgggtttgtagatccttcttagaacccatggctaagtcatattatcttgtcctacctaggaagtcattaacagtttttaccttgatttgcttatttgttctttgaattcataatcttgatcatgatttgggcaccttcttctaagagtttctccaaagaaggaatttcttgcctggcataagaaaacagtacctcctattttgctgttagtctctgaactttcaagtgggtcccaagcttcttagagtttgagccttagggtcctctctgccctttccagggaaataaagcagtggttctatgtagcaagggtgctgcataaaagcccttgaacaagacggccagtgctttccttaagggattgtattccgggtttacctaagtgcattctaaagaacatgtgtccagtcgacagctgtcttgaaaaatctcagataccaaagactcgtaacagcagtgggtatcattcactgtgaattttatattaattttttcctttcattaaaaggtccatatcccaaaaacattcaagaaacattaatctatccaggtcctaaaagcatagcatctaaccctacgttttagttttacatccttgctttggaggcgacacttgtgtagattcctgtggaactttatctgaagtactctcagagaataggcttcctcccaggaaaagctcagaaacctaaatgggttttattttatgtgtgcatgtgctctctgtgcgtaggcttgtgcagataactgtatcaccctgttcaggtcagaagagggcatcctatcccctggaactggagttacaggcagttgttagctgtctgatgtgggtgcagggaaccgaactcaggccctctgccagagcagcaaatgctcttaaccactgacccatttctccagacccccaacctgaatgtttaggagtgaattcctctcaagagttttagtatccaacatactgttaacaattctttcttagtaccatggagctgaaaatacacatgtctgtaggtagacattgaaccaaattgttttgcttgggtacaaaattgcttaacactatgcatttgaaatttaaaaatagccaaacagctctagtttcattgctagataatttttgtgtgggaaagagatctactaactgctagttttgacaatagatcaaggaataatctattagccatttcttttcttgtttttgttggtgctgggacatgcacagaggaccatggtcattctaggcaagtacttgattactgaactctcagccactattggccatttgtaatgtatagaggataggtagatttgagtttggagagaagatagtggttgcttactagtagagagacattttcagcccaccaggaagctgtggttccagtcagtggcctggaggacagggaacctcacaggctcttgatatagttaaagtggagtcaaataagcattgatttccgtcctgaaatgatttcgttttcatgatcgttagattcttggtcccctcaaatttaggtaatttatatagcatatgattgtagtaaggttaagtgtgactttagaaaatgcatgttattttctcttactttctcttagtaggtattagtttacaagggatctgtaagtcacctagaggctggagagatggttcaatgcttaagaggattggctgctctttcagaggacccagggttcaattcccagcgcccatatggcaattcccaaccatctgtaactccagttctaggatacccaataccttctgccctctgcagcatcctacatgcaagtggtgctagtacatacgcataacactcatgcacatgaaataaataagcaaatagttttttttaaagggcttcttaaaccaaaatgaattcatattaaaatttgtgccattttggaaaagaagagaaaatacacagcaaagtgatgcatttaggtattgcaaaagtgctagtttcaaagccaatcagctttctaagtgacgtttgatgatgatgagcacaaggtgattttgattacatgattagcctcttactcggtgacatcagaaataggtccagagtaagttcaagccctagagcacccactggtaaccaacacagtgtattcccatgcccccagaagttgaatgagtaacatgtctgggagctgtgggagggcagtagccaagctgggtgtggtggtacctgcctataatcccagcacttgggaggctcggccaagaggatcttgagtttgagagcagattggactgcacagcaagactcaaaaagggggccagagggaagagcaccattactcatcaaatcttcatagagcattcattgggatcctagctctaacggagagaaataggtgtgtggcgactggtaagaaaaccaaggagctgcaggtactcgagagaagcaccatagagaacattgagtcatgggtggagaagaatgtgctgatgatatgactcagtcgggaaagtgttctttacaggaaagtgttcacttgtggcttctgtgtggcatctaactaataatggcttcactaactccagcatagcgcatgggtatgcgttacacaactgtttcgtagtgcggtttactccttctctatttgttcactaagcaccctgtgaaagagtacataaaatgccacgcttcattagtagctgaaggtccccaagaggctgtaaagccctgcatggagtaggctctacagcttaatgcaagtcgtagcacttaccctttgtacctggactaacactggtaggacacctggagcatcccgggagcacaagagagaatttctcagtattacttttggctacctatccagaaagaatccttactctcttgacaaggttctctggggccttctcttgtctgaggatcagttcgagctgtggttctcaaccttcctaatgctgcaaccctttaatacagttccttatgttgtgctgacccccaaccataaagttatttgcattactacttcataactgtcactttgctactgttatgaatcataatgtaaatatttttgttttctgatggtcttaggtgatccctgtgaaagggtcatttgatccctaaaggggtcaagatccaccagttgagaactgctggactagagggttagactgtatagcttttgactgtggccccaaagctatataggatacagagctcttatcaaagccaaggactgagcatccatcaggttctattctttcttctgctcctgggaattactgaggttgtctccagtcctctccgtcagtggagatcagcacttgagaataatagatggcaactattcctgaaaattggctgatctgtttattataatctatgaaatgaaaattagctcaaaatgaaatgccagatgtgtatgtgctttgaaaatttcaaaccacaaaatactgctgctatggctgttggttagtttttggtgtttaataataaaacaagcccttttatcatgatagaggcaaagatacttacaaattctaagctctttgtttctgcctctgctggcacactttagtgatttgatgaggattgtggtgcttaaaatagaattgccgacagctgacgtgggtcagagtccatcactacagctgacccattgcagctatatgtcaggggacctggctttaggtgactcgtcctggcagtgaggaggagttgggatgctgcaacttgctatggagagcattccagagggttccacagtattgtttttctaatgtgaaatgaaaggattgtaggattgggggagaaaaaaatgctcttctctcagactgagtgggaatttgaagggtatggaaaagaaaaaacaggaaatcagaaagggcttagtagacagtatctcagttctgagcagagctttataggaaagagaatagccagctggctgggggtggggaaatattggctcaggtgcctgtgctgacatcagattgcagtgttgacttgtagaattgccttggaataaacaaatgggaacaagacatcttgtagtaggatatttgagtatatgtgtgtgtgggggggcagtgtttgtaacctacagtggtaaccagaaggatgaaatatagggcaaggtgttccaaatgagtggccccccaattattgatctatgaatatcaaagcattgagtctaaacagagaattctagaattgtaggaaggctagatgatgttaaaaaaaaaaaaaaacaacaccttgaagctctttaatctatgttctctccttctccccccgcctctctctctcttcccctgtctccttctttcattcatttttgagacaggggctctctgtgtagccctggctgtcctaaaatgctatttagaccaccaggctggcctcaaactcacagagctctgcctctagagtgctgggattaaaggcctgtgccagtatgtgatgccattgtgttttcttttattctgtgattaaagatagaaaaagtcatgtttacattttaatttggaaggttttgttaattttcattgaaatctttttaaggcagtgacttttatcatatgtccttcagtccaaagaaatgattcatttacatttcgtaatgttttacttagtagtcagcctgatctcatttctattaatcacctttagttttatgagaatgaaattttagtttttaatttagatccatgtttggtattttattctttttttaaaccaggtggtggtggcatacgcctttaatcccagcactcgggaggcagaggcaggcagatctctgtgagttcaaggccagcctggtctacagagcaagtgccaggataggttccaaagctacacagagaaaccctgtctcaaaaaacaaacaaacaaaaaatttattaatttatgtatacattgttctgcctgcatatatgactgcataccagaaaaagaaaagaccttggctctcagaagtttctgccacattctgaccagttagtcattcatgatgctttgtggtatgctttgctgcagggcagttttatctaaatgtgaacattaataggtgttatgttaaaaatttttcatagaaaagtttttgatatgctgtgtttaacaatgttgcagatttcttgcctgtagactttcttggagcttttaattaagtacatggacgaatgctctgaaactcgaaggagaagataatctacagcttttcccaaatagcagttgtctgacatagcaaccccgagggcttacattctgtagaacacacattgggagacctcagaagggaattcatgctttcaccaatagctgtgggttttattagtggtgcattcctcgagacttcttcaatagtggtgttcaaagttactatgtggcataaataaatgtttataccaacaagctttgtgtaaaacattactgattcagaaaataagattttagaagacacataatccagccaaacgtagatttcatggccctcaggagagccttcgtaggaatgcataattcaaaaatgaaactgaaagaaaacaagctttgcattttctctcctaagtgcttactgcttgaagggagtctgtcaaagtagcttgtatttcagaaagagcagccattgtgggagggaagtcttagtccattgccacatcactgtgctaatgtggagagtgtgctaacagtggcctgtgctaacatttctttagttctgtggaggtaccagctctgttcagctgttttcccagcagcagctgggaaatgtaggtttcatgaatagggttgatcagcactgtgtcctaaggttccttcctgtgttttctacctaagctgtaatgacaagagtagagcaaaggaatgggattgtgtgtgagatgaagagggaggtggggagggtagtgggggaaggaagacatcaatgatgaaagctcctagcaagaaggtttcaggtcttctgcggtgttcctttgaacagccatagcatacagcaattacagaagctgtgatatgtttcctgtaattttgatgaaataaaacctaatctctatggaagccacatgggaattattttcatttggaaaacaaagtgatgtgtttccagttggattcaggggtgtacaactgtagtctcagctacgtgggggttgggagagttgacactggaggattatttgagaccaggagttcttgagaccagcctgagcaatacattgagactgcaactgaagcagaaagagggttggggggggcaatgaccttgatcaaagtcaattaacagtgtgggcatcctagagcttctgtacccgctttgttagggtgggagaggattctctgctgaagacgaatcccttttctttaactggtaacgctagaatctttgtccctccaatgtcaggaaattattctgtttataattaaaaattagtgatgcaccctcaagggctcaaccattcagccaagctgaccatattttacaggaaagaagccattttgttttgttttgttttgtttgtttttgtgcagtaaaggcagatcaagttttggcgtgttaacagaattgctaacaggtccatgttttcagagtctaagggagaaattgaaatttttgtggtttcttgctgactagtgacagcacccatgtaataaaagcccccccttcataaaaattaggctagtgtaaactcagtagcaattttaggacagtgcaggttgtttctaaggagcacgccagttttagaggagctggaggtggagacagcagagttggcaggctgggagtgccaggtgcgtggagccaagccacagagactggaaatccacagagtgctgtggatactaaaatatggcaattcacctgttttgtgtcctgtcttactctgggagggacagaggataggcatatttattccttaaggacagacaccaggtgctggtcctggtggccacccacttgccacactggttgctttggggacagtgtcaccctcaacttttagggtggaaacagtagccttgcttttgctttgtccgcttgttttaagctattctttgtaatcctgttgtgattaaaaggaatttattttaagggtaaactgataagatgcttaatctcttagtgtatgataaaatactacaacgtatgaacagaaaattaagaatcaaaataaaaagaaaaatgtgggcaggcagtgaggtggctcagtaggtaaagatgtttgctgcctgacaatgtaaaatgcaagcctgagtgggatcctcaggagagagctgactccaaaaactgttctctgacctctattcatctggcatatatgcctgtgcctgtgttccattggtcacacactcaaacaggcacactctcataagaaaaattttagggagtttagaaaaagaaataaactgcaaaggtttctttttatattctttgaagttttatgggctggtaagatggcatagcagttaaatgtgcttggtaccatgcctactgacccaaattcaagccctagaaatgccataataaaagcagaggaccaactcatacaacaagcatggtgctcttcccctgccatgcccccacctgtttccctgtctttctctgtgtgtctctctgtctgtctctgtgtgtctctctgtctttctctcttgcatgcacagttgtgcatgcgcacatacacaaacactaaatttgtctgtttaatcaacctcatgtaggaaaatcagtttaataattaaattagacaccattctccgagtgttagtatttgacacccctgagattgtttgctaacttgagtgttaatctgttttgtcataattatttgaaaggtaaatattttaacttggggcagtgatgagaattaaaaatccaggcaaataggtaattcttagaaaatctttctaatgtttctgttccctttagatggattcattacaaaaaaaaaaaaaaaaaaaaaaaaactaaatggtgtttgtactgtgacaggtttccaagagtctgtgatgtgttcaaatgaactggattcaaacccagactctgttggagactgcctttaaatgacacaggtggtttgtgcttgtatgtgcctaagtgttgagtggcctccccaagacagagaggcacttaatgcagatcagattaagtaattaacttgattttggttgggacttggatgttgtaaaatgcacaaacattgggtttgtcttgagtcatcttattctcatttggggttgatggaaatgaagtaaggaccaagtaaacaactttttttcaggtgcaaattcgaccgtggaacctaagtgacagtgactttgtaatggatggttctcagcctttggaccccagaaaaactatctttgttgggggagttccacgaccccttcgagctggtgagtggaaatagaaacaccacaacaaaagcgatgacaacaaaatccccaatgtcttatctctgcctgggtttccagtcagcggttcacaacctccaaaaggaagtctgccatgtcattttcacacagctgacttttctatggttaagaatttcccccaaaatgctgtattttcttttggtgcaagagtcaatttcattaaaccgttttgtggaaaggatgagctctatttagttctttcctatttacccacacatttaaataatactatttggcagtgtgcgtgctcatttgagttagtgttgcagagttataccccatcagtgtatatgggtgctcagtcagtgagagctgaacctgggaatcaggctagactcctgggcctcctccagcaaggcaggatctgattagttcttaggatttccagaaatgaattatgtattgaggcatttttaaaattatgattttataaaaaaaactccctgttctatggttttttttggtgtggtactggtgtttggacccaggaccttacacattctggataagtactcatatccttaacctgctttctgcttttattctgggacagtctgatctcaaagttgccaggtaattactgtgtatgtcaggcaggccttagactcctcctgcctcaacctgtcaagtggctgagatcgcaggcctgcaccacctggccttcctctgttgttactgttgtttgttgttgctgttgttttaatttgtttccaaggacaaaacaatctcgtgctgccgtgggtaagcggaatcataatgagctagaggcttgaagtggtgttgaactaatgcctcaacatttaaacccagagacaagccaggagcagtgacactcacctgtaagctgagcactccggaggctgacacacgatgatttcaagtctgagtcttactgtagctactcactgagtgaatacaaagccagcctggactacacagaaaaattctgaaggagtctcaacactatttgaattctaactccagtcgtgtccctgacacacacacacaaatcctttagaactgggaggttgaagcatgggggggtcctgagttttgggctaacctacttagtgagcctctgtctcaaaaaacaaatgggatataaccataattctgttttgaagaactttaaaaatattatgattgtggcaattttataatatctctaaaagtcagagacctctgggtgctccatactttctaatgaaagactgtgccaaaagaaatcacttgatcaagtctagtgtttaggaaaaggcagtgtggatggattgctgtagaaagtgtgcaagaccagagaagaatcctcactgagagtcttcactgcacacggattttacagttggatagtctctgctgcaccttgcaataactacagtaccgtggaagttgtttcaacgtttcaccccttgcactcttcctatatgagaatctttaaaagtcctgaagcttgccatggtggcagagaaaggtggatcttttgagttccaggccagcgtatctaagtagtgagttccaagtcaagtagaactacacactaagacactgtctcaaaaaaaaaaaaaaaaagaagaagaagaaggaaggaaggaaggaaggaaagaaggaaggaaggaaggaaggaaggaaggaaggaaggaaggaaggaaggaaggaaggaaggtcctcacaatcataaaataatacaactgatttcaacttgttaggtcttgtttttaaggcacaggaactgtacttaataagcttcactgtacccaatgttcagcttcagcaagatgctacaagtcctagaatcagacaaaaaatgatactaggttataaagccaggcatgggcacacagctgtaatccctgtaagtggaagaaggcaggtggattaggagttcagtgttatccttcgttgcatagtgagttcaaggcaagtatgcattacataagatcctgtctcaaaatgtccttccaaatgaaaataagcactttaaaaaagaattatattcagttatctaatcagaagtaggatgtatatcctttgcctagaaaatattgaatttcttttcttttttaagctagctgttttgtattaaaattggtttgttttggctgatatgtagtagaggtctagtcagtttttctactgcaagtgttatttccagcccacttgccagcaattctagaatgcagccggtggctaggaagtccactatttaataaatgagcaagagcatggcatattgaactaagtgagtatcccattattatgttaaacagatcgttttatgtagaaaactaaagctttcagaacagaacacaagaaatgtattggtagttgaagactaaattatattctttaacaggattctgaaatttggtcttgaaatattatagaacattttttaaagtttttttttcaatctatgaatgcctgtaagagtttgtgtgcctcacacgtatgccggtgcctgtggaggcctgagggctttgggttcccagaactggacttaacaggtgcttgtgaaccgggtgatgttggtgctgggaaaacaaactctggtcctttgcgaaagcagtaaatgctcttaaccactcagtgaggcttcgggtattggaataaattttctttccctttatcttgtccaaaaactgtcatttagcatgtcagagtgactggaagactggaatgttaccatcaatattattcctgtaatctttttgagggttttttatttgttttacttttaacattgtaagatatcactaatatttattctaaatgtagcccttatccatccaaatagaaatgcctctaaagaagcaagtattgtccttgactgggcttatcgtgtcttttgaattaaatattcttactccttgacaaacctttttgttttttgagacagggtcttcctacaaactcattatcctcctgccacacatgaaccgccatgcccaggtcaaaccttcctttttaaaattcagattgtcaggggaaatcacaggcctggataaatgaacctgagtgaggaaatccaatgaaaagtttatccggatgggttttctcagccctcagtagtgggttgaggtcaggtaatgcacattgtcaccatctctctcctcttttccagtactcctgtgagtagcagcagcaagctaaggatggtttgtcccaaatctgatctttctaagatctggatttctccctctcttcacccccatttcccttcaggggacctaaaaaaaaaaaaaaaaaaaagcaggctcaccctgcccccctgtggctgaagtttgcatgttctttagagagtccacaaaagaagtaggctgtttgtctgcttttctgtgggtcacagagacaactgaatgctgaccttttggccaagtgataacaagcagtatattttcctgatgcccacacagaaaaagccctatggcacatccctgtggcaggcacatccctgtggcaggcacatccctgtggcattaggtcctctccaagatgcagctctcccctgtggcagtgagtcagtgtcaggtgcgcgctgtgaggagaccagtctgctttcccagtgctctctgcttcacttgcaggagcatttctctcactccgtcttcttgatgtaggtgtctgacttaaggactgcagaagtgactacgttttagaatctctttttcccaaattaataggctcttcatatgattactaccttcagcacttgatcaaaccaggccttgcagagaagcttcatttgagagactgcggtttttgagctcctagagcctgtcattgcttctgtagtgttgggtctgatctttcttagccattgctctgataactctcctttctttttctattaatcctgaagtttcgttctctccctgctacccagccccgttgctctatgatggcttttatgtcaaggtaaagacttattatcgtgtaagaaatttaatccgtggtgctgtgcatactagccatgttctttagcaccaagctaaagccagtcccaaccctgggagacaaagacttctgaggatatatgccacatggagagaatatatatattctcagtgtttcttgggatcatttatttcagacattttgtacaaacatgccagtagttcacatgaactggagatcacaccctgatttgtaattaggaaatggtcttgtaaccatattccctttcgttctgtgaagtagtaaatggccaaaattactgtatgtcaagtttctcagcagtaagcactttgtcttccaatcccaagttcagtatgaagcgacccaaataaacttcctgtttgacatgcttgtagggttaaggactttataatgcgtagtatgtgttcccccccctaacagacttttcccatagatgctgtcaaacattgccatatccatgacactctgagccaacataaagccaaagttagactgggttgaattgatgtttataaagcagaaaccaagccagcttcatttaaagcaaagatttacgagcagggaagaaaaaaaaactaaacagtgccactgtgtactcagcagtgtgctcagagctgctggttcatgggtagtatttatggtaacctcatgaggtggtaagcagtagactgtgtgctttagaaatgaggaggcagaattcagatggagtggcagtaaggaaaggcagcaacaagctctcggtctctggttcagctttaggatctgtgatggaagctgttttatcccgtggagatctggtttattgtctcagtaaaaaagcagctcggtagcagtttgatttaatgaacttaaataaatgcttcctttctgactttctgcttcatgccatccattaaaactgccctctttggcctcatttgacacagaatgcaagcgagcgagcatgcctcctcttgaaccttcatgaaccagctttaaaacttttaaaaaatttcatcctcctttgccatctgaggtgcttcaggtccttcctgtctgttttttgtttacttccaaagagaagaaataggacttccagatcacagtttagaatctgtaaagatgaatgtggtggtatttctcttgggaatcccaattcctctgccaccctacgtggctctcagtgtccccaacttagacattgccctcagactgtctttaaaaagtaactaaacaagaggaacaggtccctgaggtagagtagaatggggaaatcatctagattttctctctggtgaactaaagtccttgacatgtctctgaatgaagaatcaggagcaggtccaaggaaccatgatggagttcagattccacttcagcagtgtggtcagcacaagacagaattcacggaggctgctgtttctcacacggcagcttattctcgattccctccgtgttgtgtggcacagcggagctcaacacaggagccagcatgggaacagaactcaggagtcttgctgctactatggaagctgacttaggagtacggagcacatggtctaaaatgcagtgtgcccttgcacgtatctctgaatcctgctggcttctgacagaccccgagaacatcgggagtggtaggaagtagactccatattccttcatctgtatgcccagttctctcatcttatttgggttaagtttcttactatgctccagggaattacccttttcagtctctacagaaagagctttacactgagaactcactgtcttaggcttacttgataggacatgtgtcaattaaggactcagatttcacagcaaggttatggattcatctctgcagagacagatgaatcaatgaagatttagttgtccagacaattactgtttgtcttgattttctctttcccttctagaaagtcagaatggtagcctgtttttcccccattctttatttcctcccatcagaagacgggcagatacaggacttttctgtattcactaatgatactcattctagagacttctaaacctagtctctcaaagtagctatatgttacaacatttgccagtaaacttacatcctctgttttaaaaataaaaaaaatgtggggctggagagatggttcagcagttaagagcacttgctgcttatgaggaccagagttcaaatcccagcacccacattgggtggttcacagaagcttgttaactccagatgcaagggttccaacaccttcttccaggccctgcagacaccggaacacacacaagtaaaattaggtacaaaaaattggggaaacctcaaattagaaatttgtaagacttaaaagagattcttctctgtttctgttagtcacccatccagtagtagatggatgaagcttgtttttattgctgtctttataacattaaaattattgaaaaaagaataacttatgaacggtaactacttttctttaaaaaaaaaaaaaaaccctggttggcatttaaggaatatcaattatcttagcatagtatgagttcaggaagtacaccatgagaagacttacgggttgagtaaacggtcaactataaacagttgtttgattgctttttatttttttctccaaaagtgatcgtaacatagacttaacatatagatttctgagacttaaggatgactcagttggtgaaatgcttgcctagcatgcatgaggccctgagtgcaagcctcagtaccactgaagccaggtgtggtggcacatgcctgtgatcccagtgcttaaagggcggaggcaggagaataaggaattcaaggtcatccttagttacacagagtttgaagccagcctggctacatgagacaaaaacaaacaaacaaaacaaaacaaaacaaagcaaaacaaaaacctatgagttagagagatgaaaatgtgtcagtttccttgaaaaaaactcttcctttagccactttggtttttcctagccttttaacaaattgcttttcacttgaacaaaatgctcttgctcaaatatctggagactttttgatgatcaagaaaatactatagagctggggagaaagctcaatgcataaggaaggttttgatccccagagcccatgtaagcaagccctgacctagaggtggatgcatacaatctcagagctgaggaggcagaggcaggagaatctttggggctcactggccagccagcctactcttaacaggcaagcttcagggcccagcaagagaccctgtatcaaaaccaaggtaggcagctcttgaggaatgacaccaaggttggtctatcttccatcttcacaagaacatacatgtgcactgcctctactcatgaacatgcacacatacacatacaagcaaaaaatgctcacgaatggaaattacttatgattttcataaaagcataattgggtgaggccctgcttcttatcaggagttaactgcctgtaatgtcggtcatgttctaggctttggcttgtgatgatgacttttcagaaggagattcacaaaataatggaatgtttatgcttatgaaaagggccttctggcatccctaaagctcctttggagactgctgtagtataaaaaagcttgtgctaacactcttaactcctctttaaccagagctcccagcttacagtacttgcttcctttgtaatttggatacctttttgagcccttattgtggaagacagtgtcatttggttccttgccagcattcttttcctggccactcaccaggcctagggagtgttttctttcttttccattctagagcaaacctggtctttggaaaattggtgtctagtttcttgggtcttgagattacttacctcgctaagagacattcattaatggctgtgttttacaatcctcccttcagtttccagcttcctggtgagaatagcattgtccatgtgaggaagaggttaggccatcagaagatgaagtttgaggaaccactgacctctgacattcagggtacaggtgcagttgttgttgggttgtgcaagtgaatggcagtcaaggtgctgcctggaaatgcagcacagaccacttaactttaatcattggtgctcctggctggtgggactcaatcattctgaccataatgggacatttgggattgctttctgctgcttggtcttcatagcacttacttttgggctagttattactagcttattttcttacttcaaacttaacttcttttttatgggtcattcttcctatttttgttttttaaatgggcatttaggaaaaaatcagtattaggtagtctagtataaaaagaaattttgaaatgcaaaagtagctgtcacatggtgacagttttcttattgcctttgcaatttcatttatgtcagaatgaataatacttggctttacatctgttagtagaactaagggggtagcctaaaacaccattgagccctgcagaacccaggcctgtccccaccaaagtctggcgctgtttgctgcattggctctggtcactgttttccctgttttcttctttctaaatgccatatgtaggtttttgaaagaaaatgggtatttaggtcacttccgaggggtaggcctgagtctttggatttagcagtggcctgaaaagaatggccataggtggagctggtgttttcaagtaagcaattcccttcaggcagttggcggcacaggtaagtgccacatgtctctcgatattttaatatccaatgaatagctctcctactggactgatgtggtcattcttcacgagccctcatgtgggttttcttttcataactagactgcatgttctgccttttcttgggtgagttgttccaaatagttacacatagacgtgtttattttcctacagttgaactggcaatgataatggaccgtttgtatggtggtgtttgctacgctggcattgacacggatccagagctgaagtaccccaaaggtgctgggcgtgttgcgttctccaatcagcaaagttacattgcagccatcagtgcacgttttgtgcagcttcaacacaacgacattgacaaacgggtaagcaaccactaaaaatggcatcgtgatgggaaagaaataaagtttgttttgtgcggtcctgtgcagggctgtattttgtgatcttaagagggcagctgtatcttgcacagcattaggctgtcggtccacagagcttgcctaaagaagagaggatccttactgtttaaggtatggataaacctgccttgcttctttttctctggggtaatgaaaataaatctgcaaaatttagcataccaaactagtagccttaacaaagactgagagctggtcacctctttgacccaggcattgctcttaaaacaaacttgaattgacatatgcaagaaatacacataaaaatttgaacctactttattttttaattgcaacattacaggaaccaaatagcaatcacaggaaccaaatactattcccttctgtctcctcttcagctttacataattttactactcatgaaacacacacacacacacacacacacacacacacacacacacgttatgttactttccattttgctcattggtatcacctgcttaggctctagaggcatccaatgaactttgtttgatctaaagagaggacatgggagagtgagaggctcagtgtgctctgttagtcttgtgagcacctctccactgttggaaggctgggagaatggaatgtgggagtagcaaaactagaacctagattaaaatacaccaaggagaaaaataccaagtcttgactttctgccataagtggctgttcttgcttctaaatccttgcggcacggactagattagaatgcatgaagtagtctcctactatgaagcgtcaccatcctctgcagtcctcttcagttagttttgtataacaatgtccttagcatctcagtggaaatctctgttggtgatgcacttttcgtattcagcaaggttgtattttgcttacatgtgttctgataaaaatcacaaaagccagcacttagaataaatattctgtggtaccccaagaataggtagtagtggtttttttgttaatttttttttcatttttactaaagaactttttaattttgaataatttctgagattttttaagaatagtatgttccataactctgttcaccttcaggttaggctacattagctgtgtagagcttttaagctatacagtgccttttaaagagacttttaagagaaaggagctgaataaaatagttttatataaattttgattttaaatattacaacaataatgttacctaatacatttaaactcatgtgaattatgtttttttatcaaagccatcttacaggcctatccctcctattgctgccctagtcccttccagaactttcccctcccaacttcatgtgctctgtttttaaacctattgagttcacttagtgaagccgataggtgcatgaatgtagaaccatctattagagcatggatagcctttgagagaacatatccctgaagaaaactgacttttccctccccagcagctttcagttgtcatgaactcttcccatctatgtagggattttgattggcttgatctttttcggctcttgtgtaagtggtcaacagctgctatgaattcatgtgtatagtgtatagtaaatactgtgtcgctgcagatgtccactacctctggcacaatctttctgtccttctgtgatgatccctaagctttgggggttggagtgtgctatggatgtcccatttagagctgagccctacacagtcacatattctctgcatgctgaccagttatggatatctgtgttaattgccatctactgcaaaaagaagcttctctgatgaggactgatgggtacactttagcgagtataaagatgagaatttaagagcaaattattacagaatatcagtattatattctttgttagtgcttatgagctagtcggccatgggtttttgaaccagttaatggcacaagttatgagtctcattttatggagtgggccttaaattcaaccagaaagtgcctatttacgcttataacatacatgtcattattgcactagtgggcataccttaccaggccaattgttattgcttgtatagttcccagctgggtaacactgttgactacttttctcctttgatagtgtgcatagacccttccaaaattatgaaagctagccagtaaggatgaggcttccagatcagtatcagctgggtttctccatgccctatgacaaatgtggtgtcttagggggtgaaaatttctgttggtgatggatttttttttcatattcagcaagatgtcattttagcatgtgcatctgagaaaattagaataaattttctatggactcctagagaataagtggtagttgtttgtttgttaattaaaattatttttttttcagaattttgaaacactctgagttaatggagactcagaaaaatgacaaagattgaactttattcctagttttcaagtgcccacacttcctcattcctgaaagtaattctcacacaagactgaggtccagagagaggcacggtgtctctcaaacatatcccagtacatacctattgcttggtccagtctgacttgctcagtaaactcttttgaattcgcacgtggtgctttttgaagggttctcttcactcctgctgctgttgctggtggacccacctgcttatgcctgctcatttggatgtcttcatttgactcaggctgcaaccccacccatcactggtaaacctgggcagtaaaatttacctggaaaactttagattctcattggcatgaatgtagctttctctgttcccctgtgaggatgataaatgagaaagggggggggggtgtattttccaatagtcatctgagtgggagcactggagagcaatgagtgtggctcttccttttctttgaagaaagaaaactccatcctcacaccctttgcttgccctgactcttttgaggggcaggcgtggttcgagacagggtttctctgtattgctttggagcccatcctggatctatagaccaggctggcctcgaactcacagagattcacctgcctctgcctcccgagtgctgggatcaaaggtgtgcaccaccaacacctggcactttgctgactttttttttttttaagattttatttattatgtatacaacattctgcttccatgtacagctgcacaccagaagagggcaccagaacttataaggatggttgtgagccaccatgtggttgctgggaattgaactctggacctctggaagagcagttggtgctcttaacctctgagccatctctccagcccttccctgactctataaagcccattccttcactggaaggagtggagcctacttccatcttgagttgggctcttccactgtgtgtactgtatatactgcaatctctccctcctcactgttacgctgcttcttgtccttgcattgagcataactacacaattcttacattgtgagtctgttaactgcatccttcatagatgtgtttcaggctcgttcatgcttttatttctactcatctttctactgaaatttaaatttgagctttctagagagctaccactatataaaagcacatttgcatttccttaaacagtgctcttacagagaatgtctgttgtaagcacacctttcctgaatagctctcacaaggttttgcaataatctcaaaaagtaaagcctatgaaacttctgctaaaattcaagggcctgtgtccatcattacccataatccatttgtgttgctattgaagattataaggtgctgcctcttcttctcctgtaagcttggagttgcctttaagccctgactattttaaatagcatcagccttcatctcctttgctgtctgcaaggctgaaactgtagattcggtggaaccgtggcacattaaagccacttgctttctgttgtcagcccttatctcttgcattgcttactccatgagaataatgatggaagccagctgcaaagcatctgtgcttggccattaggtcccacagttcattaagcgtctggaaccttgggagtctgtggacgtgtatgctcttataagtgcaggtgcataagaaaaaaatcaatacattctgtatcgcctttctgtctgctgaaatttttcagcaaaggcatctcttgacaatctatgtttatttattgttattgttaagattttagatggagtaatttgtggagaaatatgacctttgcagatgtaatttttttctatccatcttaagagaattgctgacttaaaacatgtccgtactcaacattggttgaaatagtcaatcctgtagctttagcactttgctttcctctcagtcattcattaatcttctggtctttgaggacaagtggttcataactgctttattgagctgttttatgatattcatatacctgtaatccccacttaaatcatgcatttgaaatgtttttatatttgtactattatgcacctgtcaccaagattggttttaggcagaggtatttctacatctaatcttgtgtgtgcagtaagagaacaagctgggtagcagctacactgggggcaggtacacactgcgtgtatcctctgtattcacttggctcatcagagagggccctgtttagttaacctgtgatcttcagtcaggaacaaagtagatcaggtacttctgagccctcctgtgagtgtgtctagagctcaccttgttgatggagttgcagcatccataaaacaatgacttactgctatggcatgtctagccacaaggaggttaaaaggtgactactgggactaaaggcagtgactggcagatccatgccttgatcttgactctgacacacatgtacagggagtgtctggtaccgggcaaacacttgattagtgtgtagaataaatcagcatggctgggctatctctcgctggatatctagagttgcttctccatagtctatctctaagccgttcttctatttttggtttttaatttgttttgagacaggtccttccaagataaccacaaacttataaccttctagccgtggactacgggatcctggggttatagtcacgcaccatgacttctgacccatttaaagcaactggaatatttttataaactcataatttaaaataaatcacttccctatttaagccttttgcctattggataaagattcttctgcctattggataaagattaaaacaaacaaacaacaaacaaccttaaactttcctgaatgggcccttcatttactacatgcttgctttcctttccttccttccttttcctgagccagccataactggtcttgttctccagttcttagggtcaaaccctcaattacctggctaatgcctttccttcaggcctcaccatcattgtggtaattttaggatttaggatttaatcatcggcatttataccccccccacaggtcatcatatcaccaccttctaggctgttgtgtcactagggtgcttaaagtccatgtacttgattgcagaccacacagttcatgtggacagtgactattgtctttcagagtagctattgtgcactcagaatatgacgtgctatgcacaaacattgaatgtttatcagtgattcatctattgattgaatgttgttaagaggtagtctaaatgacctttggcatatctgtctgtccaccacatgagtcttgcacagcttttcttttctacttagttaagatattcatttgaagctgggtgatggtggcacacgcctttaatcccagcaattgggaggtagaggcaggtggatctctgtgagtttgaggccagcctggtctacagagctaggtctaagagagctagggctgttacacagagaaaccctatctaaaaacaaaacaaaacaaaaaagtcttttgttatagttttccttttttttcttttttctttttgaagtgagttccagaacaggcttcaaagctacacagagaaactctgtctcagaaaacaaaacaaaacaaaacaaaaaaaccaataaatcgtaggtcccttattaaaatttgtgtttgtttagtgcagtggttctcaacttcctaatgctgcaaccctgtaacacggttcctcatgttgttgtgaccccaaccataaaattattttcgttgccactttataactataattttgctactgttatgaattgtaatctaaacatttttggagatagaaatttgccaaaggggtcttgatccataggttgagaaccactgccaagtgcctatgctcttagggaggctaacgaagcaaagttatgagttcaaaaccagtctgggctgtgtaatgaatttgaagcacacttaagttgcatagtgaaacacttcaaaaagaaaaaaggaaaactataacaaaagacttttttattttgttttgttttgttttagatagggtttctctgtgtaacagccctagctctcttagacctagctctgtagaccaggctggcctcagactcacagggatccatctgcttgcctctgcctcccaagtgctgggattaaaggcatgtgccactacctcccagcaatatttcataaaatatgtgatttggaaatattctcttccattctgtggaatgggttgtttttactagtaatgttctgagtggcatctgccactatcacctggctaaaagacttttatttgtcttactatttcaaataactttcatggaacaaagggcatatggagttgctggggcagttccagttgtgtttctggatataactagagcatcaagaaagtaaagtctgaaagtttcagggtttttttttttttttttttttgcaatttctttcttttttttttttcttttcttcttttgtagtcaagctcttactaaatgtcccaggctgtccttgaactctgacccttagaatgtaatagggatcagccatacccacccgtgcaagtctctactctttggagagccattgctccatttaaaagtcctagcttgagaactgactttcctcccctgttgtgtgactttaaggaaggtcagaggactctggtaataagaacatcagcctgagcatctcaggtgttccagagataaggaaaagggcaggtgaatagatgtcctcctcgtcaacacagatgtccttctgtattattgatgaacctggcgcactctcttgtgcctaccgtatgtccactgctgattattatctttcctgtattttaatgtgtctatgtataagggaaatgctagttgaagacagcactagaaacgtttaacctagccactagtctgccaacactgtttgaccgttggccaggacataggtaggtactaaaagttcccttttcactttctgtttaacagaccacagagttttcttttctgccttgcgtagaaaaaaatgctttacttgtcagtatctttgaaccttaagtggaatggaaattagtgttaaattttgcttgcacttcttttaatggtagttttgtgagaaagctgaaatagtctaagacacctaagtataaccagagccaacgatgacctctgtgctcatcttgtctgttttcatggtgtttgatgccaaatgaatgcttaaatgttaaagccctgaaatggagtcttgtgtgtggctcacatctgggtcactgctcctgcagtggaaaaggaaaccattgggaacagacactctttttacaagggtgttttcctactcttgtctgctttatatggctgagaaaacaatataaagtgatttcaggcagtggtagcacacacttttaatcccagcactttcgaggcagaggcaggtggatctccgcgaatttgaggccggtctggtctacagagagagctccaagacagccagggctatacagtgaagaaaccctgtctcgaaaaaacaagaaagtatataaaaatcagttgaatcttactccatctagcaaaaaaatctatgactggattaatggattgatactagcaatctgtttatcaaactctctgcccaccacagcaattggttagcaaaacatggtcatgtctcctggaaacctctactttggggtttgtgagacttgaacagtgtcacgtggtggacactgggtaggctctgccatttcagctcaaaagtttttactagtggacaggacatagaccagaatcagccaatgcaaggtcttcacactactgctaacagacctttttctggtgtgcaaatgtgtgtgtgtgtgtgtgtgtgtgtgtgtgtgtgtgtgtgtgtgtgtgtgtgtgtgcgtgcacgcgcgcacgcgcgcgcgctcatgtgtgtgcacatagtggacatcaggtcatgttcctcagtccctcatcacctgatttattcagtgtcttttagtaaacctggagctcaccaatcccagcttgttccaaaaatcccatctctgtctctcaactggtgaaattacaggcagttgtcatacctgcccagcttttgtgtgactttgtgagattcccaaatccagtccttagagttgtgcaacaccacaaactttatccagtgggccatctccttagctcttgctacatatcttttgttttgtttttgttttgttttgttttttgagacagggtttctctgtgtactgtgtagctttgtagaccaggctggccttgaactcacagagatctgtctgcctctgcctcccaagtgttgggattaaaggtgtatggcaccactgcctggttcctgctatgtatcttaaaagaactgtggtcacccacccccgctgctgagctctgtgtgctctgtgtgtgtgtgtgtgtgtgtgtgtgtgtgtgagagagagagagagagagagagagagagagagagagagagagagagagagagaggagagtttgaaaactgcaaagcactgtcaatatttagtaacactgataacacactaattcagttggtatttgagatcttctgggagttgttcattaaaggctatagttagaatatggggtgataaagggaatcacccaagattcagtttttaagcaggaggaggacactgggaaggcaggttcatcttccccagggttgttgctgtggttagcccctattctaccataccctgaagtgttctccatgaaacatgagtctctagggacttgtttaaaatttagcttatgtttaaaaatcttcttatgcatcaaaaaagtttgaaaattcttgttcaaagaagttaggtatatagtttatttaggacatattagaatcttttacatgctaaccttcattgaaaagataaaaaaaagaagcaagtttacacataaataatattccatttataaattaaaatcttaaattagtatataacatatgatcattacattgtgacattttcatacatatccacgatttttatcataggacttttccaggatatatgtggagaataatgttccaggaaaaatactgttttttcaactttttttcctcctatgttcagattacatgaaagagtcacacaatacacagctgatcctttttccttcctcgatcctttttttttttctgagtgtgtttcaccttccatggcccttctagcgatagatggttggggtgagacaaaggtgtcatgggcatgtctgtgatgatgacagggcattgaaagtgtagttgttagtcctttagtatttatgacttctgtggtattaatgaccatccacagggccccgtgcatgccaggtaagtatttcaatactgagctgcatccccagcccccaaatttatctcttttctttggttacttgagattatctggtactttcttttttaaagcatctaaaatgtctccatattatttttaatgactttactccttgataattctatacatgtatgtaatgtgagctgccctacatgtatgtaatgtgggtgctgggcatcgaacttgggtcctctagaagtgcaatgaccttgtttgcccccaagccatgtctagcccacatatatctaatgtattgtggttgctttacccccattgttaccctctctcatgcccttctcacttcctttttcatcccaattccctctgtctgtattctttttgagacccagaggatctcatttatctcaggctagcttcaatcttgattggtagccagagctcatcttgaacttctgatccttcctgcctctacctgcttagtgttgagattacaggcgtggaccaccatacttggcttatgtgctgggatgcaaacccagaactccttgcatgctattcacatactctaccaactgagctacatccccaagccataaaatgtcttatttaagaaaataaaatttagaataccattgacaaatagtatttcctttgctactttagcttaatattgagggctagagagactgagtttcaattaaccaagttggggcttttttaggtttttcaagacagggtttctctgtgtagctttggagcctatcctggcactcgctctggagaccaggctggcctcgaactcacagagatcctcctgcctctgcctcccgagtgctgggattaaaggcatgcgccaccaatgccccgagagggagcttttttaatactttggtttaaagaacattgtaatagcacataatgttggctttcctgctctttaaaataacccccttttcatttaatgagatgacatctattgcccctttctttgcaagcaccttaagtagtttacatatttaatcttttttacttctctctttactggaaacatattgtgcctgaattttctgaagactagaaggcattgtattgaagattaagatgacccagcagccatactaaatgaagtgttgatattacagtttgtctctggccggtcacagctagaatatataaaatgacacaataacaaaaaaccgtgagggctctgggacttgttttgggggattcctgctgggatccttggtctgggctcctgtaacccagcctgtatctcactgctgtgatttctgctggcgtccttagtctgggctcttgtaactggcctgcatctgatcactgttacttgcccctgcctgatctggttcagaagctccctagccatagctgtgtctaactgggccctttgggaaggaatcagcaccccaaaccaaggagctgttctaacctgggcctctcttgaagcactgagacaatcaacagcctttgattagaacctctttttaaaggaaattgttttgtgtagtcaagtgagatttcagaatggcttcggacctttctgagaaggttctctttgctagttgtaaactctggcttcttctcacctggctttctgggtctcaggacttgtggtcagttttagaatgaataacttgttgtagcatgattaacatgttttcttgctgtcctccagtgaaggaaacagggagagtcaactcagccagagtgtcctctgcctagataccttaagggagtgaccctgtgacagtcatctagctcaccacagattcgaacaaacgtcttcgtctttgttctccacacggtataattttttgtttctggtccttggctgaaggatgatttgtgttcacgcctcaatcccattcccaggcagcatggagaagccaggctggagggccactcgtgtggcctttctgtctttgatgaaacatgaccgccaccgtgccgatgacctgagttccttccctgggacccatatgggggaaggagacaatcagctcccacaagttgttctctgaactccatgagcatgctatggcacacatacacccaagtgaatttctaaaatgtaatatttttaaagaggtgatcttaaggccagagacctcacagatctccatactcaagataaaatagtagtggagatgttggcacagggccctgttgtgtaatcatacatttctaccacaggtgtgacatcggggcatttaaacttttcaccttctagtctctcagaatgtgaaaaatggtaaggatgatccttatagagccaaagaaaataaaatcccatttattccccctgtagactttttttcagtctaccccagggcatctctaaaattaataactgtgagtttgctatatctggaaggttgtgggtgatttttgttgctagcaaaaatctatttgcacatcgctcctttcatttcctaggcatctgccatctgctttttaagcggcagggtttcagctcacgacagttgaaactaagtgctgtatttagctattcctgatacagcctactggtagggaacctgcattagcgctggggtgggcatgctagttagtggaaggctaataaggtttctgtgatttttaggtctggatatagtctctgattcaagccaagaaaactttgaatgtgaaacgctgtgggctgtcccattaaatgatttttccaagaagacttgttgctctaggtgagaggaaatggcctactaagtgagctagggcctttcatgggataccccgatcacattaaggccaatctggaacccaggagcactgtacctattccttaactttggaatgcttttccgttattttgaactcttttcccaaccctcacacagtgtgtttaacgaatccaaagcagtctgctcatgtccaccagtccctccttttcccttggtggctttggtgaagatgactttttagaggcttggcaaacccaggtgggagttccaactatggcctccaccattctgaatgggaccctgtccaaagcactcaggtccctgctgtactgttgacatactgtcggaattggtccatttggggtgatgtttgttcagaatttctcaaacctcaggaactcctttcattttgttttaaattatgagtgtgtatctgtgcgagggtatatgcatatgagagtggtgtccatggaggccagaagaggaaggcagataccctgacactgaagtcaccaggggccgtgagccatcttctgggggcactaggaactaaattcagatcctctgcaagaacatcaagtgctcttactgcagagccatctcttcagcccccaggaacttacttttaaatggtaaacttagtatttcttcctcttggccagagaaagcattctaacgactcattttagaaatacttgtcttgattgcatcacatctccacagtccttataaatgatatcttgactatgaagtgttgagtcatgtctatcttagctgtgagctctggttagcttacgtctagacggttccattgcctttagttattaaatgatttatgttggcagcttgtttatgttatcgtcagctgattttctgcatttctctcattggcaacttccacatgtgttctgaacctatccaagttaaaaaaaaaaaatcaaagttagtgtacatctccagctactataactcacccctggagcaattggggagaccattgctggcacaaacacatgttgtgtcaagctcatattcacagtatatttgaggggcctaaagctggagttcatgctttttttgaggcagggtcccactgaatagccttagctagccaggctggcttcaaactcacagagatctgcctgcctctaagagtttgtgctttcagtcctggaagtgccgtggccatctaaggccatgttgcagacgtctttacccagagctgttgtctcctttggtaacatctcatggggtctcccagtgattctggtccctctgacatatgctcagagcaggaagagttggtggttccaaccaacagctgagctagtttacccttcagttggttaaaatcttctccttgataaagcgcagctttgcctcagctcctcatttcttcttccctgatctctgagcccctcgagagacaaagaacacccactaactctcttaccctgtagttcacccctgaggccaggtgaaagtgaaggaccccactttagagctctgcttcccatttgagtggacaccagcctgccttgcacccacttctggtgatcgcgtacatccaggttctcttgggggaacctctgcttgatgcgttccctttaagcagaggtgctgttgtctttgtgtgtctcctcccatacacgaatcatcgtttcccatggcatttcacacccacaatctccatgtcattgcattctacctctccccatctcttctgtgtacgcacatgttaggacttcttcaggtgtcttcctctattgtcctccaccatgtttcttttgagacagggtctctgactgaacctagagctcactgattatgctacactgttgcctccaccccaccccagcatccatctgccagcactggacttacagacacatgtctggcttttatgtgagtgttgggcatcagagctcaagtactcatgcttgagtggtaggcactttgcccactgagctcacctctcccacccccagcccactttccttcaaatctttggcaaatctcaccattagggttctccttttattggctcctcctatctccagttcatgccaacatgatcacatctacccaacaaagcttgtaccttgtatttgtgctgtcaacgtttgtgaccagagacgagccttccattcattactgtttagttccgtgtccttacttggcttcttctccagcttgtcctcttgcactctgccatctgcaatctttggttttaattggcttctgtccagacacctggaagcatttcttacttgctctgggatagctagatacctgattatcttatttgagtagtggctctcatcaagggtgtacagtctttggctgcccttactagagcttttagacataagtcacactgcagctgaccttgtccagtgcctcatctcattactacaaacattctggtccagagagagaattctgcacctgctcatgctctccctagtgtctgatctgcctccaagagttacttacaatttttccacttactcttggaggtcagtgttttggctgttagagacaaagcaagcattgagatcattctgtttgtgtctgacattctttttgcctgtataattctagattagctagcagctacctgcagtcccctggctaaggctctgcatcagtctcctcacctgtgggactgtatcactatagcgcagggactttcagtgtgctttggcctgatcaccccatgtggctgtgaatctaaatatttctgaatgtcattcttatgtccggttcctttgagtctcctggaagtagggggtttagcttggttgtgtggccagctctgcctaggactttagtatttgggctttgggggtagtgtagatctgtaacatggttcctaacattctcctgtcattggtgtcatggctgaattgacagtggctgacagagaaaccagcttcttttctgttgtatttctttatcaagaaaagtggtattaatttgaatagttacttaaataccatacaatagtacagaaggtaccaggataaggcagaaactacagagagtttggaaatgcctttagaaaacttttattttgttattaattcaatttactattttttgtcttgtttggttatagacgttcatgtgtgaactctgtgtgtgcgtctgtgtgtgtgatacaaccagaggttgatgttggtgtgttactctccaccttgttttttgtggcagagtgtctcatcaacccgtacctcactagttggctagattaacaggcagtaagccttagagagcctctgtcccttcttccatgttgagatgaccggtacctggctcttacctggctgctgggaatcaaactcaggcactgtgtttgtgtggcactcattttgtcaactgagccacccgtctggcctcagaaggtattttagagcaacgttattgtagagaagagctgtgtctcgtcctccattgtttagtgatgttcagtgagcctataaacattaggctgggcaaatcaactttgaacaaaataatcaccctcctgtagtatcatgggacaacgtaaacatcaaggagggtttctgctttgtgcaagcctctgctcctcaggtcaacaccatacaggtgcccagagaggctttgtagtcagctctactcacccaaattggagaaggtcaggagataacttcaggaaagcctctcagaggccagtgttgatcaaaagctatatgttggtttgggaacagttgtgctatttagactcatattgactggcattaattaagtaaaaataaaaatgatgagaactcacagacttaaaagggccgttggaagggttagaagtgatagcagagtgtgaggggtgacagaaagctgaaggctgcactgtgctagcacctgacctagcagggccttcatgcctcgtggttgcaagggtacagaaggcacaactacattttagcaagaagattgtgtgtctgtgtgtgtgtgtgtgtgtgtgtgtgtgtgtgtgtgtgtgtgtgtgtgtgtgtgtgtgtgtgttcatgtgttttgagacagggattttgtagctcagaacgacctcagcccctgacctcctgcctccatcttctaagttctggggttataggcacacgtgtgaccatgcctggcacttcacaatatttacttttcaaagatcaaaagttgggactggagagatgactcagaggttaagaacactggctgctcttccagaggtcctgagttcaattcccagcaaccacatggtggctcacaaccctctggtgccctcttctggcctgcaggcatacatgcagttagaacactgtatacaatctttaaaaaaaaaaaaagtcaaaagggagaagaaatgcctcacctctggaaagtcagcttaacggggaagcgactgcagctgctaacgaggcctcctctgctgtgtctggtctttaggcagctcttacaaagatctgacatgaccctgcaggccctcacagctgtcactgagcccagctggaagccagtcagacagctagaagggccattctggtcacattaacctttcagatgtgcagcacaaaagacctacttttctgtatcaaacgatgttgtccaaaaaagtgaaaaggcaactaacatggttgaaaggatactgtccattctagaccatggtggctgaatccagaatatttaaagaatttttcaacttaacaagagaagagacaacccacttaaaacgagcagatttgtatgggcctttgtgtatgcccagagaggacatagatatggccatgcttggggtggtggtgtgtgcctgtcactcacagccctaagaacactgaggcagtgggtaattgaaaggacaacaatacgcagggacaagttgaatatccttggttattaagtaaatgcctatcttaaccatggtggggccacaccctaccaccagggatggttataaaccaccccaccccaccaccccacacacaaagggaaaataagtattggcacacgtgtagagaaaggtgctctgatacctgtgtagttcctcagaaactaaaacattgactggctggagagatggctcagcagttcagagcacttgtcctatagttatgaggaccagtgtttgaatcccagaacctatgtaataagcttccccacaaaaatgcctgtaattccagctccatggaaggctgaaacaggaggtttgctgggacttgctggcttccaggtttaccaagaggcctccacacacatgtgcacacatacagacacctataactaacatgtaaataagtcttttaaagttaaaatcaaattgctgtctgtccaactaagtccattcccaagtatttaccctaaaacaacaacaacagcaaaaaactagaaatggccgctctcagaaacatacatgcgcacacatttcaaacagcacaaatcacagcagactaaatgcagaagcaacccagtgtcatcggtagacaagtgaataaaatgtgggagttgggtaaaaatgtgcagtggaatatcatttatccataaaaaaataatgtcttctgttgcagtgagtttaatggcccggctaggtcctgctgcccttctcggccccaaataaacacatggacactttattagctgtaaaactgttggctggtgtcttgggcttcttattggctagctctgtcttaattattagctcatttctattaattaagtattcccatgtggtcttggcttccttcgcatcctctcttcctgggctctactccatctgcctacgtttcccagaattctccttgtctcaccgtcccaccagggagacattggctgaacagtgttttattcattaaccaataagagaaacatatacaaaaggacatcccctgtcatctcctcttttttgtctaaataaaaagaaaggtcttaactttaatatagtcaaattatatataacaaaacagttattaagcaagaactataattataatatttagtccattaacatttagcaagatttaaagaagctattctatcatttattctatctttgtgagtctaaagctttacatgtattataactaaggaagaccataaccacaactatctgtcttcaactccatcaaagaccacagaaggataatctataaactctagaattgacagagataggatagtgatatctttctttccttctttcttccttcctttcttttgtggtatctttcttggacaggctttatttgtgcaagaaagatatcaccacatcttcttccatgctacagtgtggatgatgcaggctgggactagaacccagagccctgtgcatgcagcatgggtgaacttcaatacttcacataggtcacaggagccagatggagcatatcttagtgtgtgcttcattctgtggaatacccagagtagttaagtatagggaaggaatagagaacggtcccagagagtgagtgtgtatgtaggtaattagtggatacagggcttcctgctgaggtgtcagaagcattttgtaaccttaggtagagtctacacacaggatgaatggatcaagtagcacagaattgtttagtttaaaattgtccatttggccggacatggctcacacctctaatcccagcattctgaggcaggagagtctctgagtttagaccaacctgttctacatagcaagttctaggccagtcagagctacatagtgagacccagtgacctaccccctcacgaggacacacctcccaatccttccaaaatagttcatcagctagggactaagcatacagatatattagcctgtgggggtcattctcattcaaaccaccacaaaaacaaagcacaaaaaaaaaaaagggttgacttgaggagatggacaataagtgcatgaggatcggagttcagatcccggcacacacagtcctgtgaccctagcactggggtggagtggggagggcagcaggttcactgagcttgctgactgcctgtggatctcagggtcagtgagagacttgtgtcaaggaactatagtggagaacagagcacccagtgctttcctctagattccctgcttatttgtggccatatgcaccggtacacacaagtgcttacaacacacacaaattgtcaattttatacaagtaagggaaaaaagaatggctggatgttgttaggtgtgacacttcagagtgtgctgaaagccggtgtgaggaaggcttttaagctaggggatagcttaaaagccaacatgggaggacactgggatagagaggagaatgttgagaatgaagccagcctgggctatgtaagttagactgtgtgtcagagaataggagatgggaagcaacccacttgagcagttataaagagtctgcattgggaggtctgggcttactgaagactggcatggatggagggagccagcaaatagctgttttgctgaggccactgaactcagtaatgcaggcaggatgaagtcttgtgatagacaactcaggtggcacatgtccatgggagaactaaaccagggaagacagagaacttggtggctccatagaaaacagtgctaagcacattgaagcagagtttgatggcctggcctcaggaagccataggaactgcagctacccctgccgtgtgtggggcagtgctcagtggctggcttcacttgctcatagggaacctataaagtaagacaagttgttggttggttgtttgtttttctcctggtatgcagatgagtggaatagttcctgggggggggggggactatccccgacaggcttgataacagagccatgttagtttatgatgcagagattaatagaagggatatttttgaatcccacttgttcagtcctcagcttaagagggggtgggggaggagctgtagagacatttctccttgggtgaccaagattgtgagtcttctgaagtgggaatgtccggtcagcagatagacagacctatggacaggagctcgcagtgggaggtcagactataacctccgtgctcccccctccctccccacttggtgaggcccctagctcatgccttctgagaggcatctgggctcagatagtcatacatcttgcaagaccagcccagccgtagggttgcttgtccctagctcggcccgccgcaggtgtgggggacacgggatcaggcttttcatcttccggcttagcccaggtgttcaagaaattcacaattcagtctttttcctaggctctgggaaaagaaacgccgacaagcagatgttttcttctttggttttgaaaggttttcatgtcatgtaacttggtttcatttgggccatgaagtgttccctgaagggctgtgataaaacaccctgttccagcttccgtgatggagagtaagatgatagagcctctgcatggccccagtccccagtccccagtccccttgcagtccctgggatccagtatagcaccgactgggacagtttcaaaagccttgtcacacaacagaaatcccaagcctccctgcaaccaccttcaccctgtcaggccttgctctggccctgccttctcaggcttggaacctttgtctgaggcattcctcctgggagcttgtttgtcccccactgactgtccatcctcaggagttaaggctgcacgctgtgtgtggggttgtgccccttacagatcaggtagcccatagagcacacagagaggttaagaactgaccagaaaccacacggcctcagatgtacagatgaggctaaggaagccttgctgagccctgtttcctatctctcccggtccaggtggaagtgaaaccctatgtgctggatgatcagatgtgtgacgagtgccagggcacgcgctgcggggggaagtttgccccattcttctgtgccaacgtcacctgtctgcagtactactgtgaatactgctgggccagcatccactcccgagccggccgcgagttccacaaaccgctggtgaaggagggaggcgaccgccctcggcacgtcccgttccgctggagctgagcccctggccgacccagctacaagtactggaatagatcacaaggaggaagagagggcactgcctcagggctcacggtgttctggaaatctgtgcattcgttctcgatttttaaagaagaaatgggtctttttattattattattattatcatttacagtcatgttactgaactcagcgtccagtataacgcagaatcgcagtgtgtgacggtacccatttgcactttgactcacaacctgtctgcttggtaccttgatttcttacacctgatctgtcacctccacagtacgtagactgccattctcatcagcggccgtcaggttgacgtctgtgactttgtttgatgttgtgttgttgtcgatctgattggtttggaactggagcatgcacttgttttcagaaacgtagacagtcgcccctaggacaagacttaccaaaggtcacccatgtaagtagaggccgatgtagcaaacactttacaatcagcaatcagtagtggggggtctcgtagagtaaggctagcccgtcatgaaaataagcctgtagttgctccgtacttggacatgtacggatacctcacaagctggatctttacttttccttcatgtttgacttttgttttgccgaggatttgggttagatcttttagtgttatgtaaatttatgctgcaatagcttttgctgctattaaaaaggtattgttgataccataatactctattcaggctaaggtatcaattaaaaacaaaaacaagaacccaacaacacacttttgtgcgttagggatagagccagctgccggggggagatgggaagagacccgagagagccagcggaggccgccgctcctgactgcatgctcacttaatgcccttgctgcatgcaataaattttatatccaatgtctagtataaaacctgcccacaatgcacaaattaagaatctatataagctataaaatactcattttttaaaagatttttttttcattcaaagaattggtaaccggtgggaggaaggcatgcctcagtgggtggaatgcttgtggacaggaagcgcccgtaacaggacgaccattagtacaaccaatagaaaacctaggcgtaggatcctcttacagcaaatctgtggatggtagatgaagtacttgcggtgctctgttatatattgtgcaatttattttatatagtaaagtgattatgtctaactgtgatcaaatgtaactgttaaaagcctctgtgtcagacattaatgaacttgaccattcataactggtatattattaagtaacacatgagctctgagttctgacctcctagtgttcacaccactctacatagcttcagaccttgtccagaaagccaaagagctcatcttagcttacaacactaagaatacacacagtctctagaaagaagttgtcaagttgacacggaggcacatctttaagaaagccacgtgagggtgatgctaaagacgtctgtaccaaggagatggcctgggcagacgcagccttgtgtgtgacactaactgctagttccctggattcacctgtaaagcttgaatagaacgaagccctgcccatgctaccgtggacactcttttagcattcactcctgggctgtggagagtaatagaaacacgcacggtgattgcaagactgtaaagctttttaaacccttcttcctttgttttgaattctggggacaatctgactggatgtgacactgcagagtagatttaagtcactgtgtttcgtgctgtgatttcctcgtactgtcttgaagtcagtgttgcttggtttttattgtagtttgttctttttgtctctccagtgtttagttgtgaatactggctctccagcttcagtttgttttcaaaaaggagaaacaaaatagttttttactgaattaaaagatgcctattagaaccctccccctttggggttttctctgggccttttggtaataattgtttttctgcagcccagatgtggtttggttttgttttgttttcttttttttctatgtttgtgttttatttttttttcatctctatgggaaattttgttatgcactactactttttatattctagaacgttttcagaagttggctgatgattttcgtttatttgtttttaaggaaaagcgcgctttctgactgacctgatcttttgcaatacctcaattttgaaatataggaaagaaaatgatattttctaagtaagtttattcagaaaatatatattaatttaattctgcaagaaaatgatttaacagatgggtaactttatttttttcatgcttatttgtgttttttgaaaatgaagaagttagagctttataactatactattaaagatcatatctaacctacagaaatctacctaattatgtgagagatgcagatgtttggaagacgcacccctctttcatgtactaaaataaccctgagctctagaggagctggaagactgcggcgtaaactaaggcggaggccgcagtgtcgcggagaccaggttgtaagagagactccatttggtgctgagagctgtgactaggtgacggaaactactttcccttaatttgtatatttataatcaagtgttgattgtgcgactgaccaggattgtgaaagagctcttctgtttgtatttttttaaagagaacttttttagtttattaaattataacatgttcccttttgtttttgtaaataaatgtgcccccccccaagttcttaatgttatattaaaagagagggtccttcaagaaaattattttttaaatcacagaggtgttctgccctgcaacttgactgggaagcccctggtaacacaggtcctgccgtggccttccttgatgggacacttgaactaagtggagttttgaaggctgtaactaacctcgactctttgttgttacgtgcaatactgtttgtactgtttgtataaaaaatagaaaaaaagaaaagaaaaaaggcataaatctttattgcagatttattttcattgcagactttagacattgtgactcacggaactcattttctactgtcaatatgtaccttttcctcatgctggtattttttcaatagtaacgtagcctttgtactgagacaaattttcattgttatttttagaaagattttttgctaagaaaaaaattaaacatatttacatatttttcattttatttcgtattttctttaaggagtgctttctcaatcactactggagttgtttctgggagggactttcatatctggtcaacgtcataatattattttgtatttttacttggaataaattaattttatgatgctaattctttaaaagtttatttttttcattttcagttatttttgaagctaaaacctttgtaatattgttactaaagtgtctagttttttgaaatgcaaagctttatgtattaatgctgatgtggtttacaatagtggcaacgatgggaacggttggttctgtaaagtgactgggactgtaacggcaattgggtaataaatgacagagtgagcagaacgtgcgggatctcgacaagccttttcctttattccagtggtttagtgtgagactagggatgtcacagtacaggtctctaaggatgtcacagtgagtttatacaacaccagatgcagcaaaatctgtggcctgacgatcaagtcacccctcctgaaatagcattgaggtgaagccatgctctgccagcagtgtccagtgctttccctaaatctcctcattatgttctctctctctctccctccctccctccctctctctctctctctctctctctctctctctctctctctctgtgtgtgtgtgtgtgtgtgtgtgtgtgtgtgtccccaccaccaactgctgtccatgtgtgagctggtgcctttccctccccaatcttttactggcatgcacagtggtgatgtgtgtgagaagacaccaccttgtatgttgcatgacttgagtgcctcacctgacgtgtccctggaagggctgacggcaggccctgacgaggcacactagatgtcaccactgttgatgtgtgagctgaatcttcctccccgtctgttctccgctatggtgccccttgttcgcctcttctcatggtgacgctgggccaccctgtgcatgatccatctgccttcaggctgctgctcctccagcccccccttcccacctctagttccaccctcagcccctggagtgcactgtgaaatcagctgttgcttctgcagttactgcagagaaggctcacagttgcagagctggtgttgtgtaaacagaacatccagggactctctagatagatggtgcatttctgctagttgttggtggcctcttctagttctgttgaagtggagaggaggttattcaagaactggggtaagcatgtgtccagagttggctcttgggttcgatctatgtattcagttttgtaaataatatatagattagatcaagttgtgatgtaaaattttaactcaaattgggtcctattggttggaattttacattaactacaaataaatgattaggaacagaagaaattgggaaaattcttgtttaagtggtataaagattatgcttagatttctgcctatatcttgtgttttatagcttgttagtgaggcatgggctaacgcagtgtactgcatttatgcaattagcaaataactgctagttttcattttatctattatattagcaacaaagtggcatttaactgggtaaagctcctacctaaatatttgagtattgtgacatctcagtttgcaaggtttgaatgaaaggttagtcacagattagtgaaaaaaaagtgtctttttgttaaaactggcttatttgtacggatcactcctctctcgctagttgtatgctgtgtttgcaatcatttatttttttcttttataaccaaacttgtcaaactcagctgccatagtgtcccatccccaccacagagtgttttataattgatgctgttgacttactaccccagattgggccaagaagtggatcatgagtctaggatgttgattttgtatgattttagtagttcactgggaccagtagagagcttgggtgctagcacaggggtgcacctgctccttcctggacatagtgctgtcggggtataaaatattaggtatttgtatttttgctgtcaaaatgatggacatgacttttagagtgttcacagctaagatctctgtatttgtttttcaactaacaactaattttaactgtactgtatcttttcctacctgttctcttggattgtttttgctggtaacccttcctctgccctggggcttggattaatactgcttgtacggattcgctactgtgactgaacgtggagctcacgcagctatggcttaaactgcttaaactttgtagtttggactttttttctgtaataacaacttattaaatctagttgtatgaagcactgacacttgtcatcttttgctacggaatctctctctgtctctcactttctgtgtgtttgctttgcatcaaggaaaattctaatttgctccattagttttttaaaaccaaacaaaacccccaagtcttccagacagttcacctattccatgaaaattcaccttttctcagacacagcattttcaaatgcacaaataaatttgaagcagtgaattatttgtggggtcagatgatagaagtgggggcttgggaatcgtgctattgatggcccactaggcctcaggcaagcttaagctgggctcggcccatgagctactcccaccccatgccttgggttttaattgccaacaggttgccaaattccttaatcagagctgttgtgaaaagggaagaattgacgccatcatatttttcccaatgataccatggtctcctaatgaattttaggagaaatataggacttttacaaagtcccaaaaaatgggactttgtaaaaattcggatgtcttctggccttgaaggaaaaggatgagaaaccctgcattgagccggccggccgggcacagggcggtttgggcacaggtggttttgagcacaggtggttctgggacaaaagcccggggtcgagcatgagtgcaggagcccatccaggtgatacagcgctctgggctactggagcaatggggaggggaagagagggggcaggacgggcctcacgggaggagggggagcagaaaggtgagaagtctgggggaccgagacagctgccgccccgtgagacccgaccctcctcagtgtgtgtcctgtgcgagcccccaatccccgccacggctgcctccacctggcccgggcgtggactcgggctccgccatgcaggtaagtgcacgcccggctacagggaccccccagggcaccccagtggccttggctggcactgtccagcacgggctccaatagaggcggctaatgtgcccgctctccagaagcatccgctcaccagtgaacaccctgctttacaagagacctggtgtaggtgtacacacacacaccacaccacacacacacaccacacacagagacacaccacaccacacacacacacacagacacaccacacacacacacagacacaccacacacacacacacacacccgtttcttagctggagtagttgaactaagattgttgagcacagaattgggggctgcattgtgcctgtgactttttctgtcagttggtgacagatctgtgaattaacccccccaaaagatcaacagcagacaaacggtaacccgcagctttgtgctgctccctgcagaacgggatggacgggcaggaaagcgcctccacggcacatcagtgggcttggccgtgtggtgtgctgtttaatgcacgagcccggttgggtacagctcgcctgaggcacttgggcggcctcaacctcggagcttcccgcccatggttaaaggtagccccgaaaaagctgctcttgtcagctgtggaatgaattgtcttcaacttaaaacagcattcatagtaagcctgggtgttgggagttgggactgacctcatgactttcacaggagaagcatcctctaccacaccctctgcgtaatgggtagctttgtaagaaactgccaaactgtcttcaaaactgagagtgcctcttactgtatgcacccacacaccccaacccacccacccaaccccggaatgcagtgcggttgctagatcctttgcagtgtttcccatatggatttttaccattctaaagggtgcttagtaagttttgttcagatttgaaatgttctgccacgtagtgtagaccatctcgtttgccttctgtgtgttcgtgtgtatggcttttttttttttttttttttttttttttttttttttttagggcagggtcttaaacctgactgacctgaaattggtctacatgtaccccaggctggctttgaacacgcagcagctcctacctcagcctccagtgtttggacgataggcaagtgctgccacactctgaaacccaatccacttctgtcatcagtgtgtgggctaaactgttctgcactggacacctggatactgtcattcagctcggccactgcctgcctggagacagcgtcagctcgcaggctgggagcccagttcccatctcccgacttcagatgccagtagcgagtctcagctacaatcaccagctttaagctgggcttcacacaacctcctttctgggatagtagaggctattgtgaaggcagcgcggttggctattgttaatctgacacacctgggaagaaggaacctcaatggaagcatagcctcctgcagactggcgtgtgtgtgcgcgcacgcatgagtgcgcgtgcgtgcgtgtgattagctgaatgtgagcctcagagaaagctagtagaggtgtgtgtttctacctcaagctcctgtttgacttcgcttcatttgttttgatgatggtgttgatacagcagaaagcaaaactaagaagaatgcaagtacagggacgcacagagtggccatgggggaggggtgtggaggtatgtgtgtcacaagtgtcatgtctaaggaatctttgttcaaccccggatctcctcctcctcctcctcctcctcctcctcctcctcctcctcctcctcctcctcagtccgggtctcatgtagcccaggttggctcctaactccctaagaagtcaaagatgaccttgaaattctgatccctctgcttctacctgctgagtgctggaattacaattatttgtcaccatgctgaggatgaaatccagggcttcctgcatgctaggctcgattttgccaactgagccacacacctaagcccccatgcttttgtcttaagtttttggtttaaaatacacattcacagttgagctaaattttgcacagcatcatacacgtgtgtgaattacatctctctatatagaggcaaatctacaaagttagttttaatggctgctagagttgagtatgtgattaaataccgagtatgtgctggagcaactgctaaaagggattcggtgtccttctggggtgattaaaatcactttaaaattagattgttatgccaggcaatggtggcacacacctttaatctcagtactctgtaggcaaaggcaggcagatctccgtgacttcaggaccagcccagtctacagactgagttccaggacaatcaaggctcagagaaaccctgtttcaaaaaaccaaaaggggtatgggaaactctcttggaaggcagttctccatttcttcccttgtaataataataaaaaaatacatacacctctccactcaccttacagatgagcataataatgtctaatatgtatcctttaccattctaagaatgtggggtctatggtctatctctccatctatatcttggttagaaattcagatagtatcaccattagccctcatggtaccaatcacacaatacatatttgtatgtgttgaaaggagatttatttatttatttatctaactatttatttattttgttttttcaagacggggtttctctgtgtagctttggagcctatcgtggcacattctgtagaccaggctggcctcgactcatagagatactcctcctgcctctgcttcccaagtgctgggactaaaggcgtgtgccaccactgcctgacctagagactttttttaagcatatggacccaattttggagactgtcctttctccattaaagaaaagccaagcaataaagcagtgtatttgcaggcatcctccagctctatctgctcctgattgctgtaactcctttaaatttaatgtcctgggaatgcagctctttcctgtttttttcttgcttaatctctgcctgtctgtccaacattctttcaggcccctctgcaaaactcctcctccaaggtatgaaaagcccttcaagtctctcttaactttctcagggttagaatcagttctttaaaaactctcactgggattttcagtgggattgatttgactctgtacatttttggaacccaaacaatattgagttttctgaacaatttggtgtctagtcctggaaattaaaccggggggggggggcatgaatgtggtatatctccacttctcaaggtcatgttgttgccatatatatatatatatttgttttgttttggtttttcgagacaaggtttctctgtggctttggaggctgtcttggaactagctcttgtacaccaggcaccctatactatttaacctatatcctcacatgctttgtaaatatgtacctgtctcatggattctggtgctgttatatttagaccattaataaatgaaattcttcctttaatcccagcactcgggaggcagaggcaggtggatctctgagttcaaggccagcctggtctacagagtgagttccaggacaggctccaaagctacacagagaaatcctgtcttgggaaaaaaaaaaaatcttattgctagcattcagaaacaaaaaattttaaatattgacaccatctccaactaaactgcctcatcactgtgcttttgtaggctctccatcgaaaatgactgtttataaggtcttttgttttctcagaagggtctcatgcagcctaggatggccccaaactttctgcatagctgcaaagttgaacttcctaagtgctgggatgtgtgagcattcctggcaggtgttttaaaaatcacatatgtgtgtgttttgtgaacatgtgcctgtgcatgtagttgatgttcaaagaggccagagggagggtgctgggtccctgggactaattagagatccttgtgagttatcatgtggatagtgggatatgaacctgagtcctctggaagagtagcctcttaaccaccaagtcttatgggcagcccccttttttgtcttttagatagctctactgtaatggctaaaagcaactggtaaagaggtggacatttgtgatttcaatttcttgaaatttgccaggtgttgcattatgcttcagcatatggccagtttgggtccattttccttagaagcatccaaggaaatgtatcctgaaagttgtcatacccagattgctatgccaaatacattatatattcagatgatctatatgctactcccgtttttcttttggtctgttgcttctgagatgtgaaatccctgttgccaccttgagtttgtttttgtggttttgtccaggtttgatgtgaagtgtttatcaagcacctgtgacttctcatgaaccaaatcacttactgtctcaggattcttcactgctgtgaagagaccatgactatggcaaatcttataaggaaaacatttacttcaggtggttctcttaaagtttgagaggttgcagcatgcaggcaaacatgggcctggagctgagagtgctacatcttgcagtcaactgtgacagtgggtggtatcctgaatgtagaacaccccccccccatgacacacttcctccaacaaggccatagccacaccgctccctgagattataggggccaattaaattcaaactaccatgcttaccattaaaagtttattttcctttttgcaaacaatagtttttactagaagggttttcctatattaatgaaaccatgccaactttggtttttctctcctttctcatctcctcccctccccacccagacagggtttctgtgtagctttggagcctatcctagcactcactctgtacatcaggctggccttgaactcatcttcctgcctctgcctcccaagtgctgggattaaaggtgtgagccaccaccgcttggcttcctttctcatttctgtgcttctctcactggtatagtaaatggcatcaaaggagtcgtgaatgtgcgtgtgactgttgccttcattttaaatcagagccatgcatacaactcgttgcatacctacaggcatgccctagctttggctggctgggccttcaggtcttttgcagtcacagcatctctgcaaggtaatcttgcaactccttaccataaatataccatcttccaaactgaatttcagtcttgactgcccctttttgggcttgacttgcctatctgcctccttggcatctctcctttaagagatgtctttatcaggtgtctgaaaattaatataaaagttgtctccctatcttcacccctccccaaatctttgttgtttccatttctcacttgatgttcactctggagtgtaagaacataacagccaggcttattttaattatgtttgtttttctgctgggattaaactgggcagcacccagttttatgttgagttacgagaacatactgccttgactgagataaacagagaaatatggagagagatgtggccagaggtgggcaagggccatgacgtatagatcccttacaggaaagtttgatgtggtatgatgtgacaaggcacggaggatctggccactagttagaccagctagaagcccacaaaaggtgagatggtgagactgcagagcagccagctgaagacactgaagtgctttgtagctagatggcacttgaaggacttgggttcttaggtagcaagtgccttcacccaccaagccatttccagcctagaaggccagtcctatctctttacaggttctatttttctaggttgccagtgcttagtataacaagcaaacattctcaaatgatcagtatcaaaactcaagtttttattgtattaattcacactgaattttctgacatttgataacagacatctctgaaattaatgtcacttagtcccaccaggaagttgaggtctgaagaaggtacaaatctagattggtgggcaatactcaatataggcatatagcagagtatgtattctttcctgcaaactctattgcattgattttttgagacagggtttctctgtatagttgtgtctgtcctggaacttgctctgtagaccaggctgacctccaactcacagagatctgcctgcctctgcctcctgagggctaggactaaaggcaagcaattctgccacttaactggccatgctctctctgcaagtactaaccaggcctgacccagcttagttctgagatcagttacattcaaaaggggtatggtcacaccttcaaatggctcccctggaatatttacatttgataaagcctctatgggagtctgctctcctagtcatcatcaaataagcagtactgcttaaagactaggctttgtgtgtataaatgttagacattatactcagaacctcaagttttaaagactttcctataaagaaatagtcagtgtatatggaccccaaatgtaatcatttctagctatttaaaaacttcaacaacaaacagaggtacaatggattccattgagctcacaacccagctcagcaccaacactacaccatgtttatcgcccaggccagcatatttaaaaacataactgacacatggtcaccaccacacagctgacagcacccagcacctcaggtcagtgttctccaccaccaactcaggagcagggttctaagttctgggttttcctttgtttgggaaactagaatgtgtgatttcacatcttacaataaaaggttttaaaagtgatactgtccccacagaaaggacagaataactttccttcccaccctctgagaaacagtttgccagtatacaaatgtactttctgattaaacctgccaacttttgattgcctagacatccactctagttgtgacttttcgtgttatgataaaaaattaatatattggtgtgaattcttcaatgataaaactgctccctacttttagaagatatgcaaataacaaataaatatttataaaaacaatcaagcacactgtatactcgacataaaatcatgagttctccttttggtctactatatttgaatataaacttacgatatgaaaaagtgtagcttttcaaaaacccatgtatctgggctggctgtttagtcttcactgtaaacaacacacaattgcacagacttcacaatttgtatttattctcttgtggaatgctaggttcagtattacagcatggttgtcaaggctactcaagtgtgacaaacttcatatctaagtgctgtagaacttttaattattttaaacaaaacccttattattgtacaattgaggtctgatggtttttaacttgatgcctaggtgtaggaccagacacaaatcttaaggatgtttattatctgtacatatatatacacaaatattccacatgtgtgtttatacacaggcctgtattaacttatgtgggatttataaaattatatacatacatgcatatctatatacagctacccaccctcaccactgagctgttttaacaccattagctccatgctcagttattattgctgtctggtataactatatgaatttagtgccaaaaccagacacattgggtataggatggacactttgtgcatatagatatgtatatccttgtatgcttgtgtatgaagagcagttcctccctgtgtctcagtcatgctctactacagtaaacagccttcaccacaggatttccaattttaagcagtgtaaaatctatgtctgaaaaactgtgttcatagttacaaaatatatatatattatatatatatatatatatatatatatatatatatatatgattgaaacctactgagtacatatgttctttgaatctggctatatcctagccattagataaattaaacaaaaacccaccctctaataggatgttattatagccttaaatataccagtacctgtatttagaatagtttttatactttaaaagtgaacaaaatgatgttaataaagatttgaaaaacactctatgcatctgctttaaatatacaaaggttgccacagggcctgcttcaattcattgtttaacatttcatgttctaaggatgactaatgttagagtcactctgaaattgggaaaagtatggctcattgaggcttttaaatacaaaagaagccctatttgtaatcaattataaaaacaagtactattttaaagaaaacaaatgctcacggacaccacagcactggtggatctcatcatgaaccaagtgactggagaggtggctctcccggcgggagcacctcctggtagcacacggaaacctggccgcttcctgtctgcagctattcagcatgtaaaatttaaatcttttcacattgccatttaaatttaatacagtgcaaatatttgagaataacttgttccccagtgaaacaagagccagcactatgctgaatattcttcagatctatttatacattcagttaaagttcaccatgacttcggagtttgctgaatatcagcagaatgtaactgaactagcagcagttgcatccagcgtgcagcagttactcgagagaacgcatgaaggtctctaggttgtactcggaatcatactgctcagcatcccagaggtcactcaggttttcaagaaccgatttcatgctcgcttttccagaagtagagctgtcggccttttctgctttgccatcctaatgaaacattggtagatagaaatgagctttttatttgagacagggtcctagaactcactctgtagaccaggattgccttgaactcagagacaccccccccacccctccacctccccccaccccccatctttgcctccggagtgctggggttaaaagtatgtaccacctctgcctttcttaaaatgagcttactgacttcagaattaccttttttaaaaaacagaaaagagggagcctggtggtggtggtggtggcacacgcctttaatcccagcattccagaggcagaagcaggtggatctctgtgagtttgcggccagcctggtctacagagctagttctgggacagatggggctacacagagaaaccctgtcttcaaaaaacgtgtgtatgtgggggggtggtcaaaggctgtagcttgggtagaataggtgcctactgtgcaccagaccctgagttcaatggccaaaaccagaaaaaagaaggcagagagtagctcagagggagagtgcccttgcacactctaagctctgtttgtgttggacctcagcacagcacaaaactgggcacagtggagaatgcctgtaatcccagcactcaggaggattgggagttcaagccatccatcctcagccataccgcaagttctctcatacaaccaatcaataaaatgggaagagacaagggtgagactaggtctaagagggagggaggcagacagggttttgctatttagtccagattagccctaaactgcctcagcttccagagtcctggaattacaggcctcaggcaccatgctctgctatgtacaacgtttccatgttaggttcttatctaatagattaaataagagtttaatcccccacaataacatttctatctattaacagtctgctctaaatacctgtatcatgtgcgtgatacagatatagatgctcggaatttaatttgcccaaagttgccaattattaggatctggaccagaaacacccacccatgagttccacagactccagagattacaagatcccttgagaaggaaaacacaaaggaaagaaaaccttgagacaagacactgctgacaatacaaagaccaagactttaaacatgtagtgtggaggaatatatgtagcccaaagttatcaactggcccacgaaatgttttagtaggcaaaggtacttgccaccaagcctgacagtctgagtcatgtccccaggagccaggtggtagaaggagagccaacttcaggatgttgttttgacccaagtgtgttgtgtatgtgcaacaactgccccacatatacggaagtaaatgtactttaaaaggccagtctggtctacagagtgaattccaggatagccgagactatttcacagaggaaacctgtctcaaaaaaacaaaaacaaaaacaaacaacaaaaaaccccacaaaggtaaaaaaacaagtatgactgagtggtggctcagtagttgaggggtgtgatgttcttgtggaggggtctcaagcacccacaacaagcatctcacaaccaccttataactccagctgcagagaatccaatcccctccctcttcaggcctccatgggccctgtgcacatatgcacacacactaacatatagaatttaagataccatctttttaaaaaatgccttactgatctcaaaagactgcaccccagcagtctggcaaactcaaagtgtgtgcgccctctcaccgttcatcatagacagcaccaagattgaataaacctaagtaagttctttaccttatccagagtaaacaagtcaagaagctgatcagtccccatgctctgtaaactagaattctcttggctgataacggtatttgctatgttcatcttgaatttctgcaagcccattatcttctcttctagtgtccctctggttatcagccggtagacattaaccacacgtttctgaataagaaaaaatgattcaactgtaatgaaaactggtaagctcaggtttgtcaagccagctcttttcattatctgaactgttactggagttttttttttctggtctcatgacctaaaatgttttcaggaaccattaaacatcaggatagacagtgacccaggtgttcttagtcaagctcagaaagtggtagtggaaatgctatcacagaaaatgtgaatgatatatccaaagtcatagcacttcttaacattaaagcaaggatttgaattagtgtgagatgatgtttacctgcccgatacgatgggcccggtccatggcctgtagatcccgcatagggttccagtcatgctccacaaataccacagtgtcagcaccagtcaggttaagtcctaggccaccaacatgagttgtaagtaaaagaacatcaatggatgggtcattgttaaacctacaaacataacaaaagagagttagtacatttcttactcaggatcttttaataaattactgttttagaaaactattgtcttaattaaggcttctattgctgggataaaacaccataatcaaagcaacttcgggagtcagggcaggagctcaaggcagtaactgaagcagaggccatggagaagcactgctcgctaccactcggcttgctcagccatgttttcttcaagccaagaccaccagcccaggagaggcacagcccacagcaatttagaaaatgaaacacaggctagcccagggccaatttggtggaggcattttctcagtcaaggtttctccttccaaatggctctagtttgtatctcaagttaatagaaagcagccaaagcagcctggtatggatatttgtcttccactgagatgacggcagtctttgaatatactgtaatggttaaactcactgtcaatttgatgagatctgagatcatgatgtcagtgagtcactagctgtgtctgtgagggagtttgtagatgaggttattagaaatgggaatacatgcccaaaatatgggaggctttctggactaagtgaaaaggaaaaatcaaacaaatgatcctacattcatcgctctctgcttcctgattgcaggtgcaatgtgaccaactacctcaagctcctgtcccctgacttctataacatcaattgtactcttgaactattacatatttttaatataatacaaaatttatatatgcatgcatgcaaatctgtagtggaaagaattcattctaaagcttatcaaaaatttcataaacagaaataaagccaaaagttgcattttatatcagatacagagtaagtcataaaaatacagatgttttcatttaaaaacccaactttgaacttttaaagtatagagacagatgatgggagtaggctgatcttccagggaaggtagaggcacacattcaggatagctgtattcttagaagacatgcatagggacaattattactaaggacaaaggaaaaggacaattattactaacattaaaagtagctgccatactggattagatggcaaattaacaagctccttcagtgtgacccactgtgaaaaataggataataaataatacgcctctccttcctagaaaacacagcaactgaaagcggatgaaccaggtgagagttttgcagaggaacacactggagcagcctcaaaccctgtgcccacgcttagtgagcaggacttttctgcgggggtgctccctcaactcctctgattctacaacttcaaaaaagccagcaagaagctaaagctgagtctctgagcccctacttgagcaagcatctatgcaggaaatgagggcagtgccttcacctggtaagaagaaaactggccaaatctcaaactaggtagactgtagtgaaagcagaggcagccaggacccttgccaaaggggtaaataaatagcacaggcatgggcactttctgtcccttgaacttatctccagaacatatggaacatgatgaggaaatttccacaaactccacactccatcatgagtggaaaagatgaagggagggctgacagcaactggccattaagcagaatgaagcccaaaaagccacttgttctgaattctcagagacatttatgttgtgaaatattattttaagttgtgttacatttgtttattctgtggaacatttgtttaacgagcaaagatgtgttgcaatcttttaaggtacatttgtttaactctgtcaagctgtgttactgtgcctgtctaaaacacctgattggtctagtaaagagctaaatggccaacagcgaggcagggctgccaggcagagaggataggagaaatctggaaagaggagcaagagaacaaggagaggaggacaccaggggttaaccaccaagccacacagtcagcccctgaataagagtgaaagtaagacatacagagttaaggaaaagaaaaagaccagaggcaaaaggtagatggaataatttaagttaaggaaagctggccaggtgagtgtgtgtgtgtgtgtgtgtgtgatagttatttgagagttgggtagcgagctcccaaaggagcgaaagagtaaaaaacaaccaacaacacttaatgtgcacaattctggcttaaaatgcagccaccaactgtactttccccatcagtatcatctgctacatggaataggagaggaattgaaaaatctttctaccaaggaagaatgtggtctgatatattcttctgttcccatccctccttccctccaggtttctcatgtatcccaggctggtctcaaagatcaccctgaactcctgactcatctcaagtgcaagaattttagacatgcctgatttgattttgctacatattttaaaatctagtttacctggcctttctttaaaacaaacaaaaaactttactcttgcacaaatatctctaaatattcttggttcctctaaattgtcttctttacacgtatgagtgtttggcccatgtgcatgtctggtacaccaggaagccagaagacagtattggattctcctggaactggagttgccagcggttgtgagccaccatgtgggtgctgggaatagaacctgggtctcaagagcagcaggtgctcttaaccactgagccacttcctcttcctcctcctccctaatctatatgctctgtagatcctaatattccaaacccccttctagctgcctttccctcttttgatcaatactaaccctatgattagttagcctcttctcttcctaatgttagtaactaaatatcactgtactactgtttgttatgcccaacagtcactgaagttaaaaaagatgattgtttttaaatgactagttggtagtaatggttgcttctgcaattaacactctcttaaagagtgtagtcatgcatgtggactgagtttccagcttactggggaggaatgacatctcagccccactggacgctgtaattcaagcactgtaaatacgtgagcagaaagaatatcctggcgggggactaaacagggaggataaaagaaaaaggaaaaaaaaaatccaaccaatgaaaaaaccctagatgtacaagttccaacaaaagaaaaccaagaatcatgaaaaaaagcagtatgaactctgtgaaaagtagtaattccacaaaaatggataccaaggagaatgagttagatgaaatccaaaagactcaaggggaaaaaaattgtaataaataatgtttaatgatattaaaagggatacaaatggcctttccgccaactcatcgcagaccagagtcctcatccagtggctgatggaagcagagacagacttccacagaaatacactgagctgaaatctggaacctagttgaagagagggaggaatgaagaacgaaggggtctgtaccaggttggagaaacccacagaaacagttggcctgaaaaagggaaagcatatcgaccctagacgctctttgggaggccagtacgggactaatccagccccctgatcatggatgccaatggggaggcccctgcactcctgggagcctccagaggtggactggcgttttgccctggtgtgtgtgggggacttcgagagcccatcccacttgaagggatgtgctctgtctctgaacacatggggaggggcctaggcctagcacaggaagatttggtggacttggtggagcccccgtttgggggccctaccctgcctggggagtggtgggtggatggggtggggggtaggttggaggtgggggagaaggaatgggggtgaggggagggagaggggaattacatgtgaaacaagcctgttccctaacttgaattaataataataaaaagagaaaaaaaaagggatacaaatgaacttctaaatatattttaaaaagtaaacagttgaaatgaggagaccaatataggataggaagcaggaattcaataaagaaatagaaatactgaaaaagtgggttccaaggattgaaattaggtcaccatgtttgtagagcaagtgcttttaccagctgagccattgcatcagcccattgaaaatttagaaatgaaaagctaagtcaaatgaaaaacccagtaaagggcctcacagaatggggaaagtaagtcagaatatcaaggacgggcggagaagaaaaacatgagcatccagaccctgagaaagataatcagggtgtgaataccactaaagaccacatttactcagcaccgagctaatactctcagcaaaaatcacggtggaaagctccctaaatctagggaaagaaatgaacacccagactcaggaggtatttacaacactaaacagaacaagaaggaaagcatcaaaactgcaaggaggaagaaccatgttgcataaggggacacctaatctcataaacaagtactacagaatgaagacatagatcagtctcaacacagtaacagtgagtgaccttcatgccaaccagcacaacagacagcctagccagaagaaaaaacagacacacgattgaaaaagaaataagagaaaagttaaacatctggagtcaaatgaaaatgagaacacagcaaaacctctgaaacaatgaaatcggctctagagggaggtttataactacaagaaacccagagagatcgagagagcgagatgactgaacaagtaaaggcatggcagaaggatagacctgttccccaagttgtcctctgacctccagaatgcaaaacacacacacacacacacacacacacacacacacacacacacacacactcaaaccctaaatacacagaaagaaacaaattttaaaaaacatgaaataaaaaagaaaactaaaacaacaacaaaaatcagtggaaaaagactgttctctgaaaagatacagccaaactaagcaatagtaagaaaacattgaaattaacaaaatcagagcttaaaaaaaaaaaaaaaaaaaaaagacacagatgccaacaaacttttgactaggctataccttaaaatttatattctaataatttaaaaattaaatggtatgttcctaggtctagacacataatccactgaaattcaactaagtggatataagtaataaatatatgaaaagtaataaaatatattctaattaaaagagcccaggtctagatgggttcactgttaaactctactagacattaaaaagaactaatgccaacattcaccaaactaactcataacagaaagcaaagaactaatgccaacattcaccaaactaactcataacagaaagcaaagaactagtgccaacattcaccaaactaactcataacagaaagcaaagaattgctacccaactttttgctttgttgtttgtttttttgagacagggtatctctgcaccagccctggctgtctggaactcacagagattctgttgcctcttcctctcaagtgttaggattaaagctgtgtaccaccacagcctagcactaccaactttttgtagtcagtattagtctgatatccaaacagttaataataaaaaagaaaattataatctccatgatgaacgtaagatgcaaaaattcataataaaatagttgcatttcaaattcaagaacaaataaagatgggagtcaagttggcttcattcaaggggttggcttaacattaaaaagaatggatgtagttcatcacataaacagactcaagacagaaatcacacaattattccaatagatgcagaggggctcaacaaaatcctcaattctgccgagcagtagtggcacacatctttaatcccacccagcactagggaggcagaggcaggcagatctttgtgagctcgaaaccagcctggtctacagatcaagttccaggacagcctccaaggtacagagaaaccctgtctcaaaaaaacaaaaacaaaaaaatcctcaattccttcaagacagaacccagaagaaactagttataaaaggaaaatacctcaataataaaagctgtatatgacagacatactaaacaggagaaaactgagagcatttcttctaaaacctggagtaagaaaaggatgtcaaaattcttcactccaacactgtgcttgaagagcagtgagacaagagaagggggaaaaaaagggttgcaaataggaaataaagtcagccaaagtttttggaagataatgtgattatatcttgggctacaagacggtttagtgattaaaatgcttgctgtggacttgaattcaaatcccctgaacccacataaaaggtaggcatgtcaaagataagtgaatcctgggggctggccagctatttagcctcaacagtgagctccaagttcagtgagagactgtctcccaaagtgaagtggagaagtgattaaggaagacattccaataccaacttctagcctccacgtgttcctacactaacaagtgcacacgtgtgtgcacacacatacagagagagagagagagaaagagagagagagagagagagagagcaaccgagctctaaaaagtccaccagaaaactcagatcaagcaaacttttagcaaaataacaattcaaaatctaaattcaaaatcagtagctttccaatataccagtaacaaacatgctgctaaataaatagaataaataaatagaaaaagtcttggaaggaaactgacctaggaatgaaagatctctacaaagaaaattatttgtttactgagacaatatatctctatgagctctggctgtcctagaacttggtgtgtagaccaggatggccttaaactcacagaaatatatttgtttcttccttctaggcactgagattaaagatctatgccaccatgtccagttaacaatttaaaaactgaaaaaatggaaattgaaaacgacactctatgtccaatttagattactgtggaaaaggctacactatcaaaaacaatctacagattcaagggaaacctcatctaaccttcagcaactccactaaagagtatataggtggcactaatgtgactcagtggtgttataaataaataaataaataaataaataaataaataaggatatgaagtatggtgggaatggaatggaaaagtagatctgggaggaagtagggaatggttgaatataacaaaaatacaatatatgaaattctcaaaggattaataaaatagctcaataaactgggcatggtggcacatgtctttaatcccagcactcagaagatagaggcaggtggatctctgagtttgaggccagcctgatctacagggtgagttacaggacagccatgacttcatagtgaaccctgtctcaaacaacaaaataaaatgatttcaataacacttcacaaaacatataaaaagagaaaatcttattcctattaagtacagaagcccttggataagccagtgccatcctcagaaaagaaaaaaaaaaaaaaaaaagaaccattagaggtgtcatcatagctgatttcaattacagctctacaagaaatacacattgcaagggcacagacaccgaaaataatgcaataaaaccaaggatccagatgtaaactcatgtagctacagcaacctgaatgtcaacaaaatgccaaaaacatacactggaataaggacagccctttccaactgacggatacactggagtaaggacagccctttccaactgatggggctgtgaaaactggatctccacatctagatccctgtcaccctttacaaaaatcaacatgtagtgatcagagactataacctaagaactgaaattttccaactgtagatatagtcatagtcaaggacttcctaaaaaggattccaatcactcaggaataatgccaagaactgacaaactgagatcacatgtaattagaaatttgtacatcaaaggaacacaatcaaatgaagagccagcctacagaataggggggaaaaaaagtctttgctaacttaatatacaatgtacataaactaataccaaaaaatcaaacaccccatcaataaatgggctaatgaaatgaacagacaattcttaaagatgcaatagaatgggttattaaatatagagaacaaaacagacatttagcatcactagcggtcaaggaaaccaaaatcaaaacgacatggattctcagaacagtcattaagacaacaaacaagaggctggggtaacagctcagtgaataagagctgttcagatcccaagaacctacaattatgacatgtggacatgcagcctgcttttaatcccagccttggaaggtggagatgggaatcctggaataatctggctatcaagactagccttgccagtgagctctgagtttgataagaccctgcctgaaagaatacgaagatagaagagtatctgaggtttgggactgaaccagggaatctgtgttgtcagaatgctgactctaacaatgtatttcaggcagtttgcagaacacacatactgcttcctagatgagtcagtttactacttgtttttagcagagaaacagtagataggacagggatctcagctaaattatctatttgcttgcttccaccctaaagcttaaacagtgagaaaaaaagcagctagctatctaagatttccactatgctttccacagtatctctgtagttctgtatcaaaaggagatttatttggactggattacctaggaacacacctgcaggtatttactcaaagaaaacatttattgaagcaaaggcctacttaaccaataacaaatacacaaagcttaccttacactaaccgttggggagctacttaccgggacacgatggaatgtctctgtccaggaggtatgctgccatctagtctcaggtaagtgaccgagggcaggtgaggcttgagcaggtcatgctccactatgtccagcatgctcttgagctgacagaagatcagtactctgtgctgggccaccacagcctctgtgccactgtccgaggtgctgccatttcccaagccacagtccaacagcaactgagggaagagatatcacacagttcttcaacggcaatagacaacaaatatttgctacctcaaatacttcctagtggaagtgtactatggaaagaaaaggttaaatttagttgtaatttattcacccattagtagttggggctaaaaaaaaaaacacccttccttagtctctgatactcaatagacctttaataaaggttaatccaaggcacaaaatgtctcaaacaaaagttataaagtaacttctttaaataaaagatactttaaaggggatcatgtgtggtgacacacacctttaatctcagtattcagagagacaggcagaactgtaagtttgaggtcagcgtggtctacatagtgaattccaggccagtcaggacaacataatgagagcctggttttgtttttttgttttgttttgtttttaaagcaattcaaaaacacacactgtatgattccatttatgtgacacagttaaagagctaagtcacagaaagcaggtcaagaactgcaaaggaagatggtgagtctctgctgggtaggcaggggttctgggttacagagtgcttgggacctagatgttaacgactgttgtacaacattgtgcatgtaatatcagaattgcacagataaagtgacttttttctaaagctgtataaaaaaaaaaactagttctgctccaattttactgtactttattaaactgcatatgaaaaacaaacaaacaaacaaacaaacacaaaatggctagatggtgttggcacacgcctttaatctagcactcaggaggcagaggccagttctggcctacagaaccagtttcagagaaaccctatcttgaaaaaataaaaatatttttagtaggccaaatctaaaaatatagtaaatggtaaatacatcaatgatctttgggaacagcaattttttttttctggtatcataaattaggaacacattattttaccgttaaaaggcatacctgtttcaaagcagaaagtttaggggcatgctgaatatcatgaagcgaagagctctggactgctagtttttcagtagtactcttgaattctggatgctgaggggttaagaccaatgctggatggttgcacagtttacgtaaatattgtaatgccttttaaaagaggggaaaaacaacttatgtaactccagttttttcataccacaagttgtatttttgtatcctttctttgctattccaattgtctagaaaatgcctactcaagtgtgcaagaaccagttcagagctaggcaagctgctttgttccacaaaacacaagcattaggaccagacttcagatccccagtacccacattaaaagcccagtgggcatggtgaactgcctgtaattccttgcacaggagaacccctagccagctaagcctaaataaagagcaagctgtgaggctcagaaaatagggagcaatctggaaaaatacccaagggggggtggtggtggtggtggtggtggtggtggtggtggtggtggtggtggtggtggtggtggtgcacacctttaatctcaacactcaggaagcacaggcaatagaagccagcctggtctacagagcgccaccaccacccgacattcttgaatttttaaaagtagtttaaagcctctacctggaatacatgacctgtagctttaagctttggtttttcagtttcttctgaaagtgcagctgaagacacggtctcatcaacatcacacttggcacgagacttagcaaaatcttcataaagctgaacctgtaaaataatccccagggaaacattatacattttaaaacatatccaaatatatattgagtaaagccaacaacagtaaattaaaccagccttcattaattaaagcaaattatgacacttaaccctcattattagtattagagatcatcctgtcatctgcgttgtccctttaaatttacagaaaaattttaaaaattaatgtgttaagttagctataaagtattaaatacaaacacacatacacactaaatttttccatttaggaaaatatattgccaataaaaggaaaccagattattatttacaagtaaatgagaagtctcttttatttatttattatttattaaaaaaaaaaatgaggctattaaaaaaaaacctgtaagtggaggctggagagatggctcagaggttaagaggctgctcttccagaggtcctgagttcaattcccagcaaccacatggtggctcacaaccatctataatgagatctggtactctcttctggtgtgcagacatacatggatacataataataaataaaatctgttttaaaaaacccaaaaacctgtaaatacattctaagaccagattttaaaagcatgttatggctagttcaaagcgttaccttgtattgactaacataatgcaaaagtaaagaaaatctatcaaagaacaaaaacccataaatactaaacaaagccaaaatgtcacttccctctagagttctcttccagggtttctctgggtagccctgactgtcctggaactcagagatgctcctgcttctgcctcatgagtgctgggattaaaggtgtggtatgtacctccacagcctggcccttcctccagattatctaaatgtgatgtttgcctttagtatagcactatcactacgatttttccctcaaagagcaaaaagtatctcatcactcttcaaacattccttccaagaaaaaaatttgttttttcctttttcttttttaagacacggtctatgtccaggctgtcctggaactcactatgtacaccagatggcttcgaactcaagatattgacccaaaattaaaagcgtgtgccactatgcccagcttcctttcaagaaataataaaaactgggagtttattgactaaaaggactggttattgaagagctgaggcatagaagaaccagagttcttggcctccagaacagtgtcctgctcactaaacccaagatgaacagatcgctgctggctcatgggtgataatattaccatgtaccggagaagagaaaactaagacttcggatgagtcttaagtctttgattcatttgaccttaccaaaccaactaatactgaaacaaaatataaaataatcatctgagtggaaaaatctgacagaaatggtttccatttataaccttagggaaatataaggaaagagtcacgataaatgctcttctaatagtctctgtgtaaaaagtcagaattaggcaaaatttaattggaacatggatagaaaacaactaatacttcaaacataataaggtcctgttgaccaagactttacacttaactctaatagtgaggttaagcaagttatttcctttttctgagttttgctgtatctgcaaaaatagggactatagtggtacacgcctttaatcccagcactcgggaggcagaggcagggggatctctgtgagttcaaggtctacagagagagtgccaggataggctccaaagctacacagagaaaccctgtctcgaaaaaccaaaccaaaccaaaccaaaccaaaaaaaccagggactatataatgcctctaatgccaccataaggatgacataataaagactggtttgtagtggcatcctctgccactttttgcttctcctactttcagttaccagtgatctgaaaatactaaataaaaattccacaaataaacaaattgtatcatgaaatcatgtgtcactctgtgtggtaaaatcccatgccatcccattctcttctgtcaggtatgtaaatcatcatccttttgtaagcacatgcctgtgagatatggcacctgtccataagtcatagagtcccaattccaatatggatcaactgtcacaattctctgtaatacctgtgttcaagtaagccttattcactcagtaatagccccaaggcacaagagcagtgaggctagaagtttggctatgccaaagaaaagccataaatgctttaagtgaaatgtctcaaggagaaagtggtggtgcgtttatgtggtaatttggggccagattccagaggattattttcttactgttggaggggagaagagcacgggtctgttttaatctacagaattcagctcactgtccttagagaaaatacgctattcctttgaagggatatctctagtctcttccactggagtgagatgtgtttcatgtttacactctactattaacagctagatttaaggaatctggctagttaccatataaacctagaagagtttaattttccataggcatctgataaaaataaaggccattattctatcaaccacgacaatgagcacattcctaacctggagagggctaagagtacagtaatagtcttgaataattttaggtggaagatcctgcaagacatcttctttcattcttctcaaaaggaatggcaggacttggcggtgcagtgcatccatagcaagaacacctgtcaacagtgagaacacagctttaaatatttggagtaaatcataaatcacagggacttactgttactccttcttacctgcttcttgttctcgacttgagcttcgtgcatctctactcgctaatataggtttaccatatcgagcagcaaactggcgttcggtacccaaaaatccaggcataagaaaatcaaatagtgaccacaactccaaaacattgttctgaacataaaaaagaaataccaattattttttcttcagttttgaaaatatcatttcccattacatctggatcctaatgtgcccccctcacgtgtctcctcctcagaggcctcctcatccagcccaggctcagcaaacagctgctctctcacatgaacatccttctaaccctgctacagctctgaagagcagaaacctgacagcttcaaaactcaactattaaagtagggaaatgggagagagatggccttttagctagacaaaacccccaaccttctaatgtctcaaacaagtacgagtagtaacctaaaaataaacctaaaagtcacaggacatggtagcacatgcctttaacaccagtatgcagaaggcagatgcaggtggatatctgcaagttcaaggccaggctagtttacagagtgagttccaggagagccaagctatacatacaaaccctgtcttgataaaaccaaaataataatttcccctccccctttaacttgtgaagccatctttattttgttcacattttttcatttattgcactgtcatatgttttaacattaaaaactgttcttcaggaatcaggtaagtggttacagtcaacaacaacatatattaatttaatgacattaataatgccaagtatttttttttttttgcttcattcttcaatattcttttgtttgtctctggagacacctcacagactctttcggagctctctgtataaagtatgtttcaagatggacacatatgaaagtcaccaaccacaagaagccagctctttctactccaacaggggtttttcatttcttcctttattaccaagttcagattcaaagttgcttctttctgaaaactgtaagcttgctacttttcctagatttgactctttggttgacttccaagtgccagactatctggttcagtgtatcagccttagggatttggaagacagggctgcttttgattctgtgccaccccaaatttatgaacccaatttatggtaccatgacaatcagaacttgtattctctgaagctcatagtccactgacatcagtacacctgcccaccagagactgaacctcaaagccaggcctccctcgccctcactgcccccaggacccagaagctgtgctagcacagcaaccgcatctcctcccttttaatgcactttaaaacacacatatacaaaacaaactttgggctaggggtttaatccagaggttacacttgaggtccagggtttgatccccaacacaacaaaataatgacaacaaaaaccaaaaacccttagtaagtttagaaaaaactgtaaatgaaaagcttctctcatcattattaaaatatgcagtattcaccttagaacagtgattctcaatcctgatactgtgactctttaatacagttccttatgtggtgaccctcaaccataaaattattttgttgctacttcaaaactgtaattttgctgctgtttgaaccctcatgtaaatacttggtatgtgagatatctgatatgtgactcccctcaagggtcaaggggtggagacctagtcctacaggttgagaatcactgccttacaataagcagtcactgctaaaaataaattcaaaataaaattagaagccaagtgtggcacaaccctttggtccccagcactcctgaggcagaagcagagagatctctgagtttgaagccagtctacatagggagttccaggacagccagagtgatgtaaagaaaccctgactcaaaagaaaaaaatagaattataaagaattgctgcgcatgacgcacacatctgtatcccagtacttgggaaattgaggcaagtaaaataaatttgtggccagctatactaaagaccctgccttaaaaacaaaacaaccacaacatcaatttttagagctagaaaatatccttccaccaattggagaatgatcaaggtgatcttcctgtcagagatggccatccaggttagagaggaacatttgctgaatttttcacacttctgctgtggggtgagattcatttctaagttggtgctagattttcagtgctaaatcagattgctgagtaatactataggattagaatcaatctgtttcatacattgaacaagtgttacttaaacagcctaaaattagagtgtaagcatgatctttaataaaacctgaccagtttaagcaagcaagcagatctttgatttcaaggccagcatgacctacacatagtgagttctgagctagtcacagctatacaacagggtagatggaacaccttgagtggtagctcagtgtaaagagcacttgctgctcttaaagaggaccaagatacagttcccaacacctacaacaatttcacggaatgtgacaccctcttctgtctctgcgtgttccttatagaggaaaaacattctcacacacataaaattaaaaatatatatataaatgtaaaatatttttcatgattcattatgaaagaaaggtgtggtcatgcacacttgtaatcccggcatttaggaagcagaggcagggggattacaatgaatttgagaccagtttagtctgtctagcgagtttcagaccagctaagggctacatagtgagatcctgccttaaaaacaagacaaaagggctggagagatggctcagcagttaagagcactgactgctctttcagaggtcctgagttcaattcccagcaaccacatgatggctcatctgtaatgagatctggtgccctcttctgatgtgcagatatatatggaaacagaatgttgtatacataataaataaagaaaatcttaaaaaaaaaaaaaacccaaacccaaacccaccccaccccaacccaacccaaaccatacttgcctagtttaactactgccatataccaaaggaacctttataaacacaatttaactactgaaaattttgtgttatctttataaactaaaagatgtacttagtagccgggcattggtggcgcacacctttaatcccaacactcaggaggcagaggcaggcagatctctgtgagttcgaggccagcctggtctccagagcgagtgccaggataggctccaaagctacacagagaaaccctgtctcaaaaaaaaaaaaaaagatgtacttaatttactgctaaatgccattcctcctggcaattttgttgtttttgttttaaacaggaagaacagtaaacaattacctggattggtgttccagaaagaataatcctatagttagcagtcagttgttttactgcttttgacaatttagtttttccattttttatgacatggccttcatcaagaatacagtagttaaatttaatatttctaaggaaaaataaataaaatgttattttttcatatatatcagacattataggaacaaccttacaaacaaataattaagtatttgtaatttcaatatcaaatttttctcatttttgctagaaatatttcatagagactacatacagaaaaatctacaattctgatgtgaatggatgcatgaattttataaggtacacttacacacatagccacacttcagtgcaaaacattgtgttccagcaacctgggaatgtcttttgtgttttctcccaactaagtttttaatttaaattagcatgcattcgctgtacaaactgatggtttggttggcattttcacacatatacaccaagaatgtttgctattcatattcagtacccccatgactccatctgactccccccttacctatcaatactaaatttttctaaagaatatttgaattcttacctaaaaaagtctatgtcattcctcacaacatcatatgaagctactatcagattatgtctttttacttgatgctgtaacctttaagaaaaattaggaaacagaaatcattaatttcttaatacaattttattggtttgtttgttcattttttgagaaacggggtctctctgtgtagccctggcttttctggaactctctgtagacaaggctggcctcaaactgacagacctgcctgcctctgttctctaaaggcatcaccactgtcatcttagtataattttaatagtgtaactacagctacaattataaagtgcttcaatttgtctattgagcatttgtgttcaccctgtatttaacagaccacattctttaagatgcagacttgctatctggctcaggaaaaaagataagcacctaactcaaaatataccactttgtcagtatctctgcttttgggacacattcctttcccactcagtatgtggagcttatcaatcatatatccccataatggaaaaagatgaagcatcagaaccaggttaaactatttacaagattttgtcctctgaacatgattcacagccagtcttgttcagtactgaagaatctctgatcaaagaggaaaacctacttagtattgtagtggggttaggagaatgtgggcttgacccatttacccatcaactgtacaataaagtcaagaaaataccaactcaacaaattacgtctgggaaggaagaacaagtaagagtacttgtttctaaagcaataattcaggcttgaaatttgagggagtaaatttcaccctgtttactaacactagcttgagttaaattcctatcacaaattcatgagatgctattgggactgctggagtgcaaacgtttgaactgcttatgttcaaatcctcactctgtctgcttaacaaacttaagtgatcttggacccaagacctatgctttacaactatctcaacagtacaccttagagaagtggttctcaaccttcctaacactgtgaccctttagtacagttcctcatgttgtgtcgactcccaaccataacattttatcactacttccgaactgtaattttgctactgttatgaatagtaatgtaaatatcagctatgtgaacacccccccccaagaagtagcaacctacaggttaagaactataatgccttagagggtggctgagtgcacaattgctgacacaacagtggtgtatttacaacagccactgtggaccaaaggtacaagaaactgaagtgggaaaaaaggaaacagaaatacttagagaatagaaaagagaaggaggtgctgtagtcacaaggtcctcaaaagagcagggtggacatgcttgcttctagtttctcatacgaaatacttagaatgacagtgggtgggacagtggctcaagtcctttattctggtgagctttactgatgtcttcctaaagtattgccttcattaagttgggttcctatggttataatcagagctaactataattcacttctaataaattttgtacttccaaactatttaaaatgtgaaactttttgttgtacagttcttaccttatcctttcagtgggagggccagtataatgcaatggattgagatattctctggagcaaaatttacctacttcatctacccaatgccctgttaatgttggtggacaaaccaccaaggatggaagtggcatacattctgctagtttcgatcttgcgtactcctgggccctttacaagagaaaaaataattaagcaacttttttttttacattcatcagaatttagaacctttattttaaaataatattttaaattacctctgacaatgatctcctgctagaatgcagatggactgtaatgtttttcctaagcccatgtcatcacacagaattccatgaagcttatatttattaagaaaggctaaccagttcacaccatcctagaaggttgggtagagaaaagaaaattataaatgtaaaaagatcacaagaatttttttcttgtaaaacatatttgcatggacctaaatctttacattatcaaaagagaaatcaatatagaaattaagcctaagattttactaaatcaaatagaaaaagtgacttcatttttacaagatgaagaataaacttacctgctgatactttcttagttcagcattgattggtactgggatcttataattttctaacttcttcccatctaataattgctctaaaaagtgtcgttcttttgctttcatttggattaattcttctgacatgtttggagggtctggaatgcctgcctggaatgatttttaaagtgtattaaaattagtttagagataagtttatattatattatatttatattatattagtttagagatagtttagaggtaacctgctcatttctctagtgccttactagcattaaaaagccctgatttcaacaatggcactgcttgaaactgtatctataattatagtactcatgggttggaggcagaattcaagttcatgctcagccaccaagagtttaaggtcaggctgagttacaagagatcttgtctcaaaaagaagtattaactaatacttgttccatgggtggggtagcaggaggacccccccccctccacagtctcactatgttatccaaaggccttgatctcactagatagtcagttgatgctgtttactaaatttcttatcctaaaatgttatcaaaagaattcagttttattaaaacaaacacacacagagaaaaaaagtaattaaaaacagtataaagatttgagggtaaataaatataaagattttgaaagatgttaaaaatgcttgaattagacaaaatatactcgaggcattttaaagaacataattaggacttcattttacagtgttaataaaaaaacaaagatatataatctaatttacattccatgctattgagaactatcagttttgtggtgttctaatgtcctcaggtattgaatcaaaatatagcatgtaaaagtcccaatgagtatctaaaacctttctactgttttataaaattacaagtttataaaaaggaaggaattgtgctttttttttccattttgttaacatctgtagagttttgtagcaaaactgtcatttgtaactaccagtcaggttcatcgaaggaaggcccttgctaggctgatgaaaatggcaattgctactaaatctcctccttgagcatgagacaaatgtgactacatacaaagcacttctgttccttttcaaaatgcaatatatgggagttgagggtgggggcagaagcactagagactgttaactgtgtgctaaactagccttatttttccccttaaataatttaaacacatcagtatccttgacatattgtgtgtgatgttcacagatataccctgactgtatgcagccttatgtttcaatattgatttgatttttgtgtgtgtgcgaatatacacatgctcatgaatgcataaaggccaaaggaagatgtcaggtgtcctactttgtcactctccagcatcttcccttcattgtctcactgaacctagccagtgatcctactgtcctgccacttaggtgacaggcatgtgtggccacatcatctcaggttctcatacttgtgcagcaagcactcttactatccactgggaaatctcctcagtccatcatgctcttgagataaatatttataagctgggggtatagccagttggtagaacacttgtctatcatatacaggctctatgttatattcttaataccataaatacaaaatatttatagttaacaactctggatcatgtaattactgttcttttaaaactaattttacccatggagatataaaatatacattaacatagcagggttgctttgtgtttccatgtttgtttgggagatgagatacattacgttacttcaacctgagtgaggtattttaatagggatgaacctaaattcaatcctctgactttcacagccacacgcatacaaaaacaacaaaaaaagatttaaaaacagttgtcattagtagtagaagtattagtataaattcgtgaacttacctctagtggcatcagtctaattaatgttgcaaagcactgagtagccatgaatctcacactgtctgtctgatcactcattcttcctaatacaggaacaactaaaaggacaatatatggaacaataccaacatccaattgttccataacacctgagtaagccatcaaggaaatttcaaaaataattcccaggtagatgtcttcacgtactagtatactaagattgtaacttcagcattaaaaaaaaaagtgacattttcagacttgtaaataatatatcctgaccatttgctttttattgctttctgagtcagggtatcctataagcctagaatggccttgaactcttgatcctcttgcctctatctcttgagtactgggattacagacctacaccatgctgccaggctcaagattatgacttctgttagtaattatgtaactattataattaaaaatataaaattgcaaaccaaacagtagtggtgcctgcctttaatcccagcactcaggtggcagagacaggtagatctctgtgagttcaaggccagcctggtctacaaagtgagttccaggactatgcaaagaaaccctgcctgaaaaaaatcaatataaataaaataaaattggggctgtagatgtggctaagcctttatgaacattggatgctcttccaaaggacctggatttgatactcagaacccacatagtagctcataaccatctatagctccagtcccagggaatctcatgtcctcttctagtctccagacatacctgcaggcaaacacccatacacataaaatctatctatctatctatctatctatctatctatctatctatctatctatctatctatctgcttatttatctatcagatgtgtgtatttctaacagttaaagattttatgaatatgggtgttctgttcacgtatctgtctatatttgcgtgcctggtacccgaggaggtcagaagagagagtcagatttcctgggacgggggtcatgggacagcctgtgagctatcatatggatactggtaatcaaaatccagatcctctctaccactgaacaatctcaccagtgtgtgtgtgtgtgtgtgtgtgtgtgtgtgtgtgtgtaatatttttgtctaaaggggaatagagaactctaacaataaaggagtagaattcagtgtcacacaaagattaattccaaatttcccaccaaaatcataaaaatcaccacctggatatactaaacctaatcctgtggctgtgaaaattctgaaccaggtttctattgatttgatcttatccacctttcttgttttgaaacatggggtttacacattctgagttaaacaatggctgccaggtccttaaaaagagcttatagtacatttctagattcagtatatttcagtagaaagcaaaagtttatataacctgaagagaaaccagagtttaacatgattttaatcactttcccctggggaaaaaaaagaaaaaagtttggaaacatacatttaaggtaaatataacctatccagtatttaattaatactaatgaaacattaattataagatcaacagatcagttactagtttaaattacataaaatcactttactaaaaacttaccctgtcttaagtagttctttaagcttttaatatgaaattttaataatgatatataatcaaatgaattcatagtaaaatgtgaaatacttcaaaataaagtgtaaaactgtcattttggaataaagcagatttacatgcattttaaaatgagtgaactttgagttagtcttcaatacatgaataaaatttctcaagtttgacaaaataaaggatacaggcaagtgcttcaattgcaccttcttgtttgatattgtcatcaattgctcccagccacggaagcaccttctctaaaaaaatattcatcgtttccatggtggctattttgctcatgacacctatgcagcgagctgccatgtgcctcaccgcagtgctggggtactgaaggcacatatacagatgaggcaaatgctgtaccagctttaaaaaaacaacaataacaaaacaaaaagcagtcacaatacttattagggaatacttacagagttcagtgttcctaattttgttctaggtaccatactttggtgggtatttccatattctggattaccatagcattatgatcacagcagcatctcactgttaaatgtccattgcatagaacaatgatagccaactacttgttcaacagtgaggccagcctcacatttcagctgaatacagggactaaagatgggagttctttctttactaattaatataagaagatggggagagctttgagatggggactggtgttgtccatgcttgcctcgaacttctgtacacaagcaatcctatctaacctctcaagaaaatggaaaacagatacaggccactatggcttatcagaaattcttaacaagcaaaaggacatactacttttcttcctaatattgccctgattcacttttatgaatcttcattttaatgttacacagctataaagaagtaaagctacaactgtttgcaatacaataaattgtaaagagccttcctaatgtagacatatggaacgatttttttttttttatgaaaccaaataattttctacttccctctttcctctgcaaactcttttgctaaaagtgtaacagtaaaaaccaaaccaaaaccaaagccacacacacgagtatcccctggccaatgaccagcttcatcttagcacacgatctcttgcttctcaagacatccttctgcctgagctattcctattgttggtcaacacagcctacaatttcctttctctttactctttcccctttccttcagaaccctttctacaatgctcccgaaattagaaagctgagttttctatcattcctgtactgtatttgtgagtcccatacagaagaatctagttataccaaatttttttgaaagaaacaccatacatattaattaccaagggatgaagtgcagaatccatcgaggctgctgctatttcaaaaacttgcagagaattcaccaattcttgagcaggaacatcacctctttccaggagggactttccatctattcaaatgaaagttgtatcactttttacataactttcaaaatctagagaccacaaaaaatattagtaccctctcagctagtatagaagtgtcaacaagaaaagaggagatgattgggatgcccttctgtatatatgtttctcttattggttgatgaatataacactgattggccagtagcaaggcaagaagaataggtggggctaccagacaagaatgctagagagaggaggcagagagaggctgcatggaaatgccgtgtagccaaggaaggagtaataggttcagacccttctccggtaagataagaacatgctgaaatgattagattaatagaaatgggttaatattaaacgagatctagccaagaagcctgagccaccggccaaacaatttaaaaaaaaaaagtgtcaacaaagctttttgcattaaaaatggtgtagtgtgacattaagtgctcaaatactgcaccaaatagatttaaataataattcatttccaaatctgttttttaaatatacaaaaggggaaaagcatacagaagaatttgaaaattaccagtcttccattttaaaaattacctactggtctaagatagagatatgcagttttcctctccctccctccccccctcccttcccccccccctttggtttttcgagacagggtttctctgtatagctttggagcctgtcctggcacttactctgtaaaccaggctggcctcaagagatccacctacctctacctccttaaatgctgggattaaaggcatgcgccaccactacccggtgcagtttttttttaaaaggttatctgatacacactgaaatacctgaactgaatgcataccaaaattatttaggtcaatcatagtcgtcaacgggccaaccatggcatcccaaagatgtggcaacttcactgccatttcagcaccaaaatgcttcactatagttgttaaggcaaattcagctcctctccgttgtaccaggtaaggcttctgaccctaaaatccaatgttagttgaagaagaattttagaaatgagcattatgcattaaaattttaatgaagaggattttaaagtcaccacctagaagctgacagtacttttgccaatgaaacaattactagatgcatttatgacccccgaaaacattttccaataatcaactccacacaggcaaaaaactcataactggattttttgtctaaaataagaaataaaaggatacctgactactagaaacagtcaccagtagtattttttaagtgttccctgactcttagaaacagcagtctcagagatgaaaccatctatctccactccatatgtgcaaacttgcacgcacgcacacacgcatgcatgcacacacatacacagtttctctatgtagttctggctgtcctgaaactcactttatggcttccaattcagagcaactgcctctgccccccaagtgcttggattaaaggcatgcaccaccaatgccagacacttttttattagtaattagagtcataaagtggcttctctcaaagaacacacacagacttttaaagtggaaaatctatacagagcatggcgatacaatcaggaggctgaggtaaacctatcacaaagaacttgaggctggcctggaccacccctacaaaaaaagaaagaaaacaaaagaagctcgggagtggtagtacacacctttaatcccaacactcagaagcagaggcaggtggatctttgggaggagttcgaggccagcctagtctacaaaggaagttccagggcggcgagagctattatacagagaaaccctgtatcagaaaaatattaaaaaaaaaaaaaaaaagaaagaaaagaaaagaaaaggaaaaacaagagctgtatcaaatcatggtaaaattttcatgaaagttatggacagagataattggtcaaacagatttataaaacgttcaaaagaaacagtggagccaaggtaagtgctgtgtctaacaatcaaaagaacaggaatagtcatcccatcgctaatatgctactttaagagctatggttatggcagtacaaaaccgttgcctgtactccctgtccaactcttgttcttaaaacttgtaatcctctacctcagcctcccaagtgtttaccaccatacccagcctaaagcactttctgcaacaccggttatgggacaaagatgtagctcagtcagcagtgtttgcccaccatgcacaaggccctgagtttcattcccagtaccgaaaagaccaatagaccaggtatggtggcatctgggaggtgggtacaggaggatctctctctctctctctctctctctctctctctctctcctctctctctctctcatatgccacaacaaactggatggaaaaatcatataaatcatcacaaataggaagcatctttatagcagagatgaaaggatttaaagtgaagtgacggctgttcatatggaaaactagatttagaaccttaccctggcaaaacacatttaatgtaatacctggttgactaatattaggtgttactattagggcacttgtaaactttgtctcagaacatcactagaattgttggcattgataggacgaagaacaattagtctagtcatcactgccatttaatatgacctttgcagtcaatgttttgagagtgagttggtttacatttacgaatagcttatgcacctactatcaaaaggggtagctaccaaacaacttaagttacataaattacaagagaaatgagaatttaaaaattaaaatattctggtaatgttgccaaaatactttaaaaagctattaattcacttggaagcacaaaaatacaattctgaaagttagtaatacaactttgttcttaatctagaaactaaatatttaaagagtaaaagcgttcagagaggggggcaaaaaaactatttacctcatcaagttcaaccaggacattcccactacttcctgcaggcagatctgctatctgagctttgattgccttggggataggacctcgcctgctagtgatagcaaaagctgctttctgatgcctatagagtgtaatgatacctctgtgcttggtgacagtatggtgcattccatctttttctgagttggatcctaataaggaaaaaagacatttaatcaaactataggtgagcaaatgtttactgctcctaaaaagtcataatgtaattttaaattgagcaagacctcaattttcataaaggatcctgttgttagacaatgaaatggtaacaaaactgtctacttgaattaagatttatactgaatataataaaagttgtagaatcaaaaacaatgaaaagtagcacatgcaatgatagtttcttccccccacccccaagacagagtttctctgtggctttggaggctgtcctggaactagatcttgtagaccaggctggtctcgaactcacaaagatctgcctgtctctgccttccgagtgctgggattaaagactgctgtctgggaggccagtacaggactgatccagacccctgaacatggatgtcaaatagaaggcccctggtagtggatttagtatttttccctggtgtaagaagggactttgagagcccatcccacaggaagggatgcactctcggcctggacacatggggaagggcctaggcccggcccaggatgatgtggtagactttggggagcccctatcgagggccctaccctgcctagggagtaaagggtagatggggtggggatgggggggagggaagggagagggagaagggattgatgtgaaacaagcttgttcctaatttgaactaataaaaaaaaaaaaaaaaaaaaaaaaaacaggcgagcaccaccaccgcctggcttacaatgatagtttctatacataagaaacactaaaaaatatttcatgttctcctaaatgttcataatcactacaagttcagaaaaaaaatgacactgtaaagtactgcctaatcacaggggaagatgtagatcctactacatttttaaattaatattaaacatgaaactttcttccttctcatttgttttttttaagttatgtctactacattttgtataatttaggttttctaaaattttattgataaaaaaatcatatatgacttagtattgtgactacaccagtgttagtcttatctctgaaatcatcttaatgaaagagttgtgtgcgccaccaacacccagcacaactaactttctagcatagttataataagccatacaatgactttcaaggttaaggaatggtgaacacagactttagctgacttacatcacttcttacatggactggtaatttgcaaataagagggctggctgattaactggcaagtacacagactgatacaacaattttgttataattaatctttgctcatggagaataggaaatgggggaaatggttctaaaaggaactggatttgtgcttaaataatacctataatctaatagtaaaacaaacttaatggtcaattccttctctatgcaaataagaggtttagatatatacctttagaattttcctggccactttgtgttggtactggacatgttacacagggagtgaggtatgggtccacacaaagagagctacagaggtttttaataacttttgaattaggacatggtgtccttgttgtacactgctgaagaagcttggctatgcactgagcagcatagttctgtactagcgtattctcttcttttttaattgtttccattagtggttttatgataggattcaatttctctggaagctgctgcaagctcacgactgcacatgcagcaaaagtatgcactctcaactgcaacacttgccactcttggttcgtctctgcaactgtcatttggacctgatgtcgtttactatctaactgctgtaacacttgaggatttaaatcaaaacttgatgtgacttcattaaaaacagtagttacctaataaaaaaaagaaaaaatgaaaaatcattaattacaacaaccccagatagactctaaactcctaaatgtcagttttctcctttacttacaaaagtcccatagtatcaagaattttttaatatttaataaaccaagtaaatatcgaaaatagcccctaaagtataaattagtctgtcttaacaatagcattactttcttaaggaaaagacacattctcttgagagaaaatcactattaagtataccaaatttcaacaatgagcaaataaattagtaacagaagggtaagaataatggttattttggaggaaggagaggaaaggataggcttggaaactgtcaaagtactctatcttgattacatttgtatctgtgaaaaatccataaattggtccactttagatctatgccttcatctaacaagtgcaaatgtctgaatttacttagaaatgttaggaaaacatcagatgaattggtggctggaaagatgggagatactgaagtacacctgtgatataatgaacttggaaaaatattaagtgcaaaatctaaacacggggtatgaatgagtgttgctattctaaatgctgagtacatgagcagttttgtgtaacgcttttgcttctatatgtttcaatatttgtatcttacaccaagcagagaaatactcaagaaaccacagaagcagtttttcccatctaccaaaatcttatgatacaccaataaatgacaaaactttacaagttttctattaggatgtattaactagttctctgtcctctaatttcaagaaattcagtacaatgaaataacctttctaaagagcaggatgacaggaaaccataccacaaaaagattcaacatattagtatgcttctggggtgacacatcatggcaaatttctaatctttatttcatgtaaagttaagaaagttacttctttactcaccagatcattagcttgatctattgttaaaacattgttgtttattctattacccacttcaatatttgcatcagctaatgatgatataaactgtttacattcattctgcattcgtgtgaatggaacagcaatttcatcataatacaaatgttctgaaaggatatcaagtaaacgtggctgcacagctagggtaacagctttacactcctaaaatacaatagatatcaagactcaggaacatatagaaacataatggtagagatgtttaaaatactgacttcagacaaccaaatgctacattgcactgattttcaatctatagtctgttatcttccaaaatagttagttacacaaaagtattacatcaaaactactttgaaattttaatgtgaatgactacagacatgcacatttaagtattataattgcatttaattttcaacctaattattcttagtgtactctgaatttattcaatatatgtatgcatataaataaataaatagataaacaaagcagacattttagaagtatattactataaaaaccagtcaggaatcaatctggcatgcactaaaaatattattcaaaatttggtattagagatctttaacagttcaaccacagcttcacatgctgtattgtaaaaatggatataatttaaaagctacttacctgcccccaaatttaactaacccttcccactctctctggttgttgcctgccccaacaagagggggaatggcctcagtggtagccatgaggggttctgtgggatctgggtgatcagcctgggcttcacagagtaaatccagagaagctctgtgagggtccagaaaccgaactgtcaacacttgctgctgagtctgagaggcacaaaaacacagcatcactgcctctccagcacatggggtcctgacaacaaaacagattaagctttgcttctttccagaggcaaagtggggtctcaattgcagtaaagcatggctcaatgacttttagacaaagctttgacaaactgctaagaggcagtaacaagcaactctcacagcaagtgcagacagttaaatttccagaattccagtcaatggaataaacaaaaccagcaggaagtttctttgatttacagaaacaagtttaaacaaaatgatacatcttacagaaatttaaagttaaaaaggatagaagggaatttggctcatttggaaatgaaaatttgagtttaaatgtggaaatctttttcttgtgaccaaaacttctacctttgtcactatccatataaatagagctccaaaattacaaagcattgaaaatgtgctgcctgaaaacaatgaccaactgaattacacattcaggctttggcttgcatctttctatacaaacaagactttaacaaggagctttgtaacagactgtagggatgaacagatactaaatatgagcacaacttagtctcagatatgaatggggtgctaaaaaaaaaaaaagttaaaagtaaatggaaaacaaatcatgttcaatattatatgaaatactttcccataactattagatttctataaagaaactataagttataaatagtcctaaatactaatggaagttggttttactaaagttgcctttattactttaggaatatatcttaccttttgtaaagcagcccattcacagattactaatgcaacactaattctctgtaacgcagatttggagttcaaatgaaatagtagtaactggccaagggattctgctggtttaatttcttggtttaccatgtttacacttggatcacaaatacagcagcaaagtgctcctaacaacctaaaagagagaaaaaggccgtactataaaatttacttgagggaaaacttctcttactaaatccattaaattttccccataaaaacgttaaattatcttctaccttattttcatgaatagacatggaggagtttgttttgtttttgacacagggtctaacatatgccaggttggccctcaactctctgtcactgaggatgactttgaactcctgatcaccctttctctcaagtgacactgtggatgcacatcaccacactgtctatttgttgtgtctggggtcaaatccagagatttgtgtatgctacaaaaaaattctactaactgaaccacacctccaactccaaataataataataataataataataataattttgtttaaatccagagaattattattattattattattatttagaagacagggtttctctgtgtaacagccctggctgtcctggaactctcttgtaggccaagctagcctggaactcacagagatccacttacctctgtctcctgagtgctgggattaaaggtgtgtggcaccacccagccatctatttttaaaacttcaaaaacttaaaaatatttacttgcttttttcttagataactagtgtaaagaacaactgacagacatgggggaaaatattttggttcaattttatagctattagccaaaattttcaatatatacttgacacttgataaatgaatactcacttagctgccatcatcctggccctcataactacaaaatccctggtagctgagtcttccatgatggtgtctgcacctgcaatatactcctgaagcacttctttattctgaatttgaccttgccgtaccttaccacctgttttttcctagaggaaaaacaggaaggaaaaccaataattaaagattaatcaattaaatttagttggaaaaaacaaagccagtaaaatgtagttcttttcataaaattctaaattactatccagtttgtaataattactatccagtttgccagaatctggataaagaattgatcctgcctaatgttaatgacgacaccctcagaattaagcaataaatacaactttctcaaacagttactatattggtaataatgaatttaacatagaaataacttaggtttctctatacttaccttggcttttgattttacttctagcaacatatttaaatcaataggtaaatgagaaggctgcatcattaagcaaagccaagcacccatccatgggcaagcagctgctaccacatactgaactgaagccttgctcaacagttccatccaaacctagggagagaaaaggagaataaacaaaatttgaaatatacttttagggaaatgaactggagggaatatgatacagtaaagagattcacctgaaaagtcaacatagaggttcactttgaaacactggttagattgataggtttctatactacatgaaataatgcaaaggaaagtttgtggttttgttgtttttcaagaacatgggggacataagattgctcagtgagtaaaggcacgggctaccaagcttgacaatctaagattgatttccagaacctacaagtgaaaggagagaaccaactcctaaaaagctgtcctctgtcctacatacccacaaccaaactatcagttatggttttttttaattttcatgtatttatgtgtgctttgtctgcatgtatgtatatgtaccacatgtgtgaccaatgcctatgaaggtcagaagaaagtatcatatcccctggaattggagttacagatgattataagctataatgtgggtgctgggaatcaaatccaggttttctgcagcaacaaaagctctcaatcactgagccaatctccagcccaggaaataaagttttaaaaaaggactataggagtcaggcattggtggcacattcttttaatctcagcactcaggaggcagaggcgggtagatctctgagttcacggccaacctggtctacagagtgagttccaggacagcctccaaaacaatacagagaaaccgaatctcaaagaaacaaaacaaaaaaaggtatttgaagaatccagtaatctacaagatgatccaggaaactaggcttcttatggaatggaatataagttcagtttaattatgtttctttgctttttcttctatgtcctaatgctttactttttaaaaggattttattttctttttaatagtgcgtggggggcgattctttggaggtcagagtattctgtttctttgtgtagggactttgtgggcatctctgtaacagggtctcacataaccaaggctggcctgagcttgctgtgtatgattcacctcaaattcctgaccctcttgctttcttctttcattccttggcttacaaataagttgagcatgtttgacttggcatgtttaatttataaagtcttccataaactattgaatattctcttgtattggtttgttgaatagatcatctatctgtgtatctcaggctggacttgaatccacctgtctctgcctccccagctcgaggattaaaggcatgtgccaccaactctgggctctcttcaaatatcttaattggcttaattcattaaaacccctcacccataacatagtaattatattttaaattttatctacaaatttattaggataagaaatacagtcagactcataatgtaccttgtgaataagatccagaatttcctggctgctttctaaaacacaaaactgaaaaatatgtcgcagcatatcagacaggataggtataagccaagatgaagagttctgaaacaaaaacagaatcaaatatatgacatgtgattcctggacattaggttacatgaactaaaaaaatcaagtaacacaaacattgccatgaaaagagtgaattgttttatcagatagattcaactggtgacaaattttaacatgccttttttggacagaacacctaaattcccaaatattatttataaatgtttgttttcatttaaatgtggttggttataaatggttaatgatcacagccaatctctttttaaaggaacaagggggaatatgatatagaaatgaatactttgcattggtatggattttggtttattgatacaaatttattgatacaaatacaaaattgatacaaaattgatacaaaattatgcatataattttgttattatatgcatatatctcctcttgtttggatgttgtgtttatatagctcatttgaaaatgtaatgtataattaaatacagattgtagatagtcacctatgatagtcaaaactgataatcgtgttagttaggttttctagatatatagagatatgtttcacatggatagtcttcaaaacttttcaaagacctttagaatatggcatttaaatggtttagggtttttcatgactctgagacacaactgctcctgcaataccaattacgtcaggaaggtggggatcaaagaaacttgtagtggagtgtgccttcaacatggcagaaacagccatctgggcaggactgtatgactgtatgctgtataaaatggacatggaggacctacagcaaagtgactgctgagcgcgtgaaaacaagatgggacagacatgcagggttcctgcttcatgagtctgccagacattctgcaggacacagagaaaaatgactgacaaacaaactgccagtacaggcagacagtttaaaatttcccgcttcactgagaaccctgccagacacactaggtctgtgggctgaagatgggtgccccagcattacagagcaactttgggtgactgtccagtcagatgtctctgtcaattccagagtttatatgttatccttctggggtctttgagggagttgaagacagatagttagggcttcctcagttaagataaaagtaagttacatataaaactttagactcacaaatagaatattttctttaaattttgccaaatgttaatgaactaaatactgttaactatagttctcacttgataactgttttggtatatataatttgactaaagttaaaacctttctttttatttagacagaaaagatgatgatgggaatgtgcttctgtatatatgtttctcttattggtttatgaataaaacactgtttgtacaatggaggcaggaaagacagtcgggtctatgagagacagaagtgaggagagagagagagagagagaaagaggccgccaggaagagatgccatgtagccgccaaaggagtaacaggtccaggcactctccagtaagccaagaccacgtgaaaatacatagattaatagttatgggttaataattaagagagagctagccagtaagaagccctggccatagagcaacagttttataatatagcatccatgtgtttatttggggcaaagcagctgcgggaccaggccaacaagacttagcagcaaaaagtaccacatcataattgcaatggtttaaaaattacaaaatcctataaccacacggaagtggaagaccctgattatcataacatgaaattttcttcaattaagttgaaagtacagaaccaagctataagcaacagtgtcatcagcatatgtcatgcctttgccaagaaaatgggaaatgctcagaatactgccgctgggctaaaggtgaaagcttcaattctatgtactcatcaataacgcaaggtacttagaatagtcttactttcttccctaactctcatctcaatcactggcaatctaaacagttacctgtagaccccaacctccatctctagaggaagatgtctgcactgtatttataacaagtaaaatgtgatataatgtatattttctgtctcatgctacaaatgctgataaaatatacactgtaagcattcaaatctgcctgggagaaaagaattcctaggtagagcacagaggatgcttagaacagtaagactattctacataattgtgcacacatgacacaagaggtttggtcaagcccatagactgtacaataccaagggcaaaccctaatggaaaactataaacttcagctgatgcaaatccaataataatagtgagtgccttattttcccatatagagtgctcacaatggggtatgccatatacagtgtgagattaaggtattttgggaacactgtatttttccttcagttttctatcaaaactgttctaagaaagctgtgcatggtggcatatgcctttaatctcagcagtcctgaggcagaggcaggcagatctctctgagtttgaggtcaatttgatctacagagtgagctccaggacagccaggtctgtgtagaaacagcctgtcttaaaaagaggagaaggcagggctggagagatggctcaggggttaagagcactgactgttcttccagaggttctaagttcaattcccagcaaccacatggtggctcacaaccatctgtaatgtgatctggtgccctcttctggcacgtactgcatacatgacagatatttagataaataaataaataaacaaataaataaacaaataaataaatctttgggggaagagagagagagagagagagagagagagaggctgaatgttggtggagtgcgcctttaatcccagcactcgggaggcagaggcaggcggatctctgtgagtttgagaccagcctggtcaacacagtgagttccaaagcaatacagagaaaccctgtctcgaacccccccccaaaaaaaaaggaaaagaaagaaaatgatggttccagtggtagaacacttactttgcatgtgtaaaacctgggtttagtccacaacattatgacaaacaaagaaaagaaaatgctccttatgatatgttgcaacaatgagattattatcacacacctattagaatggcttaaataaggaacactagtaatagtatagactggccacaatgtggaacacttactgttgaaaaaagggcaaaaccgtgcatctattctaaaagacaacgtagaagtttcttacaaaacttacagtaacatatccttacagtatagtatgtgggctccttaatatctgaccacaggaggggaggtattgaaccatacaaaaacctgtactatatagaaggcttttgtatatactaacaaaacttgaaagtatccaaggtatcctttcaataggtgaatgaattaattagggtacaacaagacaatagaaatgtaagacacccttaaaaaaataagctatcaagacaagagtcacaaagaaaacttgaatgcaattacgaggtaatgaaaaggttccatattgatgactccaactacatatgcaaaactatgtagacagtaaaagataagtaattatgagagagtaggaggatgagaaatgactagaagaacaaaggtaactttcagagaaataaaacaactctgtactgataatggtagacacatgtctttatgtatttgacaataacatatctttcttagaatcttccagttttacaggcaaaacaataaaaaaaacccacaataattgtgagtaaacagaagagatctttatgaggtgatattcttagctacagcaaccttacccactaagttactatggaattactcaaagtgacagctgagtgtatcagaaactgacacaggaacatacctaaaaaaacacatttaacattcagaagctggaaagcaattcagtaggtatgcaatccattttctatgtcaaatttaggtaaaagctgagagagcttgtgtaacctatgtgaatttgggaaagtttcttaatttttgagcactagcatttgcaaaatataaatagttgccacctcctatacaatgcttttcataattcctagcattaagggaacccaataatacttcagagtactattaccttttttgttttggggggtgggggcggaggggttgagacagggtttctctgtgtaacaaccctggttgtcctggaacctgctttgtagattaggctggcccctcatagagatctatctgcctctgccttccaagtgctgggattaacacacagctatattgttactttttaagtatcattcttacaccacagaacataaataagatttccaataactgggggctggagagatggctcagaggttaagagcactgactgctcttccagaggtcctgagttcaattcccagcaaccacatggtggcttacactatctataatgagatctggtgccctcttctggtgtatacataataaaaaagaagttggagaccattctcagtaacacagagagaccatcaaagggaaagacagagggcagagagacggaagatgaaatgaaatagaaaaagaacttattgtagaattggatctttctattgtgaaaagtaagaacttccatgacaggctctgtgtaagctggagaaccaggaccaggaatacaattctgagaaaatcagaaggccgggaaccacagggactcctatgggttcaagagtacaggattccagaagctccagtacccaaagacaaaagaagatccatgccccagcacagcccattatgagatctggtgccctcttctagtgtgcagatatacatggaagcagaatgttgtatacataataaacaaataaatataagaacaccatttttaaaaaaagaattccagtaatcaagtatggtataagtatgttttactctgtgcaattatttatatttgtatagaattaatatttgcaaaatcatttatatcatctcactttttaactataagaaaggccacacaggaatgctggtttttttgttttgtttttttttttttttttttttttgataatgtgtatgggtgtttgcctattcaccacttgtgtgcctgatgcccatggaggccagaagagggtgaaggaaaacctagactggcattacaggtggctgcaagacaccatgtgggtgctgtgaaaaaaaaatctccagtcctttggaagaacagccagtactttttagctgttgaaccatctctccaaccccaggtttttgcttttaattggaatgtattcttttaacgatttgtttccatttttatgtatataagtgtgttgcctacatatatgtatatgcatcatgtatagggatttaactaaagaatgtaggaactcagcctctttctgaaatctttatattattacagactgaggtgtcagacactgatacaagctttaggtgattgctcctcatgttctgtctgttaccatgctaagaaccctgaccaatacctaatgctgccacaggtacaagaacaggggaagcagacgaaagaaaggaaattaaaaataattgtaggctttattgtaacatcaaatattttggagccaaatgtgctcagaatatttctaattttcggaaaataataaagttgtatgcactggacattatgtaaccccttatagagtctgaggcaacacttgactaaaatgttattttataaataggcacatgcagaggagaaaggctagaaatagcttttcaggatggtttggcaccaaatgagtaattttattaattgacaaaacttacaaaaagctttgaatttcaaatctgcaggcaagaaaaaaaatttaaaaatcaggaaaggcatcatggaactatattagtaaagattttatacacaactataaattatcaataagtaactaccggataatctgtgaagaagacaataataaaaagatggcatccgatggagaactctaagggctctttagatgttactggaaccagatttacaatgaagttttcactgcataatagttttgtccaaacaacagttcagatttaaatggggttgcagaaagataattcagcaggtaaatgtgcttgatgacctgagtttaatccccagaatctggtaggagaaaaatcaacccctgcagtttccctctgactgccatgtgtatactagtcatccatacaaatacaaatggaaggaaggaaggaaggaagaacaaaaaccagaggggtggggagagagctcagtcgtggcatgcttctcttataagcacaaaaaccacagtttaatacccagaaacccatattttttaaaagggaaggaaaaacaaaacaaaacaaaaacctagggctggagagataactcagtggttaagagcatttgctggacttgcagctccagcagtctgacaccttcttttgtcctatgggacactagacatacatggtacacataaacggatgcaagcactcgcacatacacataaaataaaaacaaaaacaaaagccaaacagggcaactaaggaggcaaaagcaggcagatttggcaaatgccaggccagtgtgagccctgactcaaatcaaaaaggtaaaagggtgatggagcccaaggaatgacagacatagaaaactgtcctctggcctgtgtgtgtgtgtgtgtgtggggggggggggggggttacagaaattaaaatagtttagagacactgaaaatctgacctgttccataaaggaaagagtaccctgaaggtaaacaggaagagagctcacatttagaaaaggatttgggtgagccatgtgttcatgcatgtgtgtctgtttataaacttagagtagtaagccatatgcaaagataccctgatcaagtacacctggttatagctggataaaaagggcagactgagaaatgctctcaactctggggtataaataaggaaatagattaacattggtttgataccagccagatatcaagataaacgcaggggtttactatagcagacatgaacaagctacttaacagtttgaaaataactgagctatggttccccaaactgttgtgtttttttgttttgttttgttttgttttgacagcatttctgcctgtgtagccctggttgtcctagaactcactctgtagaccaggctggcttccaactcacagagatctgcctgcctctacctcctaagtgcttccaaactgttctagtagttaacttaaattcttccttttaataataccatgaatgtgcagaaacaagtaccagggagaggaagataataattttgtaaatatgtaaacagaagaaagtacataaactggaaaaacaggccacattggactacacagcaagaccaattctaaaacaaaaaagacatgttggggtggggggttattctttgggacaaggtttctctgtgtagctttggtgcctgtcctggcactccacctgcctctacctcccaagcactgggattaaaggcatgtgccatgaccatctgggtaaaaggtgaacatgtttaaaaaagggacattccatcatggctgggaagtcaaggcaaaaagagcctgaagcagctagtcacatcacatcaatcaagcagcagcgaacacgggagctggagagatggctcagttgttgcaaaggacctgcatttgagtcccagcatccacatggagggtcaaccaccttctagggcaccaggcatgcatgtggtgcatatacacaccactcatacacataaaataaaaataaacccagtgacaaagtaacaaaaaccataaactccaaaacaaagtgattggcccaaataccaatttcagtcctcaggaggctaaggcaggcaaatgtctgtcagctggagcccaatctggttaacataaggagttccaggccagccaaggccacacagtaaaattctgtcaaaaaaagtgattgactcaaacacttaacactttattggtatttttttcctgacatattttcttcaatctccagaattatttcaaaactaggagtgtaaacaggactcatcagctcaccattcatacactaatatgacctgagtgaatactgtgggaatctcagtatgtgtctgatgaattacatgatccttggcagcacatgctctttgacagtaatttttaagggaagacaatttgaatcccatagtcagtcttgaaggaatttgacttcagtgattcaaatgcagcctttataacctgggatgatttctgccaatgacccatcaaccataaagactaacgtgcctcctataggaagggaatattcaatcaacaattcacttaatatttattggttatctcctatgtattaaacattactccaagttctgagaatataaaactaaaaattctaaaatacttctgacctcatattgacgatattcttatgtttatatggttaccatccacctactatatccaagcattcagattttttgatatatagcaaagatgaggctaacatctgatctgttttataaaattaatttacaaaggttttgaagttgcgatttataactatcagttcttacctggtcctgtgttgataacaatgtaaagagagtttccaatgctgctcttcgaactgaagatatagtgtgatgcaaaaatggccaaactcgtggaactaaaactgtgagtgactgctgaatactaacaaagaaaagacaaattaatcttattcattctcagttgaaactccataaatatgttatctaatatcaatgttgtatgaacctggtgataatgctgacatgtctctttcataaataaaagatgatccaattttcatgagtattcacttaacactcattcaaaaatgctattctaatactaaaagagaaaatgcagccaataaagggtacagatttaatcataggtttttctaaggcattaatgctttaactaccctcatcaagttagaactttccaatatatctgcagaaaatgggaaatgtatcctagctacacatcaggttcccataactgttttccattctaggggctaaccttaatgtgtaactagctaatcataatttctattcctctttcaggcctcaaatgaacaagagattaagagataagaatagtttggaaatttgttattctggcttagcaatttctagattaggaagactcacatttcttccttctcagataaggttttaaaatgatgaactaggctaacttgaatcatagcacttctgccacattcaagagtcatttctaaaaggtacctcaaactagaaagtaattcttaaatagcatttgagccatgtaccttaaaagaaaaaaggtagtaacaaaaaaggacatggcagaatcaacaccatcatctgtcaccgccaatgcctccctcaaagcatctctttaatgctattttcattatttgcaggtatgcctgaactttacttcttgcacttatttattttgtatattcatttttaatgttccaatttaaatacatgcacatgcagtcgtgagtgattcagagcacataaaagcatcataacaaggacttgttaatagtgacatgtggcaattcttgtaagctagaaagtatctgccaattacaacaacatatggtgtaatttttctaataaggccaattttgaaataaaaaaggtgggaaactacattattttacattggattaccagaaattttattatattgcacaagtttcttatattatccacatttttaaaattatttcattatttttattatgggtgttctgtctgcatgtatgtctatgcgttacatccatgcagtgtccacagagaccagaagagagcagtggaagctctggagctaaagttacggatggctgtgagccctaatgtcatgtgggtgtcaggaattgagcctgggtcctctgaaagaacaaccggtactcttaactgctgagatctctccaacactacattatttagttgtcttgggtaccacctgctaaggtctacagactaaatctacagactttttttttttttaatgaaagttttactggaactatgtattgtatactggcagttttctgattacagtaacatagtggaatagtttcagctaagaatggctcacaactaaaaatgatcagtatttaacccttcaaagagatttacttaacttctggcttaaagtaatttaaaacccatgactttacagcattgggagagttgtcgaatgaactcacttactccctttgtattgtattagtagcagaagctgtcaggagtgggaaaaccacatgtcactaccactgtcagttgctgtcttctgatgtgatgtgtctatgggaactaacttgctactcctacttgcatgctgttttgccggcctagaatctgcactaaatactactagtcagtagttgcatttcatacatttgaatttcactgaaatactcattcatacagttggaagttgctttaaaatcataatcataggaacatccactgaataaactcactagactaagaacagtaacttcccatttgtgaatttttaaaaagctgtataacatttcttctacatttttgtgaatactgttagtagaaacaatagcagcattctggcatgttaaatttgaaaaatctatattctgggccatcactggaaataactgacttttgtgtgtgtgtgtgtgtgtgtgtgtgtgtgtgtttaatccagctgtggttattttttaaacttttttatttcatgtgcactggtatattgcctgcatgtgtctccacagggaacacgggactgaaattgcaaggtcgtggctgccactttgtgagatagggtgaggagagcctggacaagaatcgtggtattgggatttcacagactgcagaactggctcagtaggtaaatacatacatcatacaaacatacataatacattcatacatcgctcatacataaatacacatatacacatacacacacagttccacatatgagtgtatatacgccggtgaacattcacacacataaaataaaaataagtgtttaaaaagagggaaaaaaggcataagctaccatcaccaggtctaagattactgttttttggttttttgttttgtttttgtttgtttggtttttttttttttttttttttttttttttttttttttttgcttgtcttttattttttgctgttgttgttgttgttgaggcagggtttctctgtataacagctctggctgttttggaacttgctttgtagaccaggttggcctggaacagagacccacctgcccctgcctcccaagtgctggccttaaagtccaccacaacacagcaaaataactgcttttaaaataaattaatttaaagtatctactttcgattcacaagctaatgaactataaactagctaactttaggtttctttccttgtgtaagtgcagtgctagaacttagagctttttacgttaggcaatctcccactaagctctgataccaggccctaaaataatctgtctcaaagttcaagtagctagaataaaggaaaaaaacttcctgagagacagtggtgccctcaatatacaacactgttcttaaaggtactagaatagtctaataagaaatattacctgcattgctggacctgagggtaagttaacatggatgaaagaagagtcataatactatttgttgaagctgttagatcatctaattccaggagagaatcccataaggtatttataatggagggcacctgtaagatcaatttttaaaaaaagttatcatctgcacacaaaaaaatcataaatcctaccaaattatatcccaaagggtcattaacgaatcaaccagatatataattccaatttggacaatgtcagttttaagtatcatcaaggaaaagacactacttgcctttaacaattccctacccgctttttaatgccattcagctctactttcatgattttctctctcagcagaattttactgggcaggataacttcagggaatttaagtgatataaacaatcacgaaaatacaagtttagttttgaggtcataaaataatgttggctgtacttttaacttcatattctggatttgataaaatgaaaatgcagctaaaatttaatagtctcttaaaaatgagatcagggccgggcgttggtggcgcacacctttaatcccggcactcgggaggcaaaggcaggccgatctctgtgagttcgaggccagcctggtctacagagcgagtgccaggataagctccaaagctacacagagaaaccctgtctccaaaaaaaccaaaaaaaaaaactaaataaataaaaataaataaaaaaataataagataggttaaaatgctaagaaataaaatcaaaattacaatttgacatctttaaacataaggagtaaattcaagatgaaatagctgtttctttttcaaggagcttctgtatattatgtatatgaagggaattagacaatacacaactcactgttcccaaagacaacacataatcaagcttgcatgcatcagaagaagagaaaagagaatttttataaaagatgtaggagataaaataacaagaatgcaatgttttttctactataccataccaaatgtaaacatgcactataggaagaaaacgacgagaaactgttaatgtaccttttgtgtctgaaggtatacaaggctttctactacaggcactaaggatgctgcagcaacagctctgacatcatcgtcaaggtcctggagtccttcaattattcgagttaaaactttaggcaataaagtattaattacatcctgcaaaaaaagtacatcaaaacaggctaattttctatggtgtaattactgtgttcaaacatctctattaactttgaacacatattccagtatttttatatttgaaaagaaacacaaacataagttagcaaaagcttacataaataatcccactagagaaagattccaaatacttattaaaagctatcaagtactggggctggagaaatggcttaggggttaagagcactggttgctcttccagaggacccaagttcaattcccagcacacacgtggcagctcacaactatctgtaactctagttccaaggtatccaacaccctcttctcacatagacacacatgcaggcaaaacaccaatgcacgtaaaataaaaaataaactaatttttaaaaataagctatcaaatactatagaggctggtcatgattgtacacacttttaataccagtatctgtgagttctacaccagccagtactacataataagaccatatcaaacaaaacaaaacaaaaggttattagctagatggtgcattcctttaattctagcactaaggaggcatagacaggcagatctctgtgagttcaagccattctgagctatacagtaaaaccccattttgaataagaaaaaaaaaaatcaagtactttattactggatataacctaaacatcagaacagttcctagcaagactataaatgttgtatgtgaacaggaaggtagatctctgcaagttcaaggccagtctgacctacagagcaagttacaggatatcccacctcaaaaaaaacaaacaacaacaaaaaacgaattggccttgtggaactgggtagtaaaacagtttgctctacaagcatggagatccgagttcaaatccccacaccaacattgctacctgctgtgggataatctttctgtacactgtgagtatgtattcctctcattggttaataacgaaagctatgtggccaattgccagacatgttaaggttaggcagaacaatcaaactgagaactcagatgaggaatagggagttgacagatgccagccaactgccaaacaagcagggtgtgcagaaatgaggtaataagccttgagtcatgtggcagaacagatagaaatattggttaatttaaatgtgagagttagtaatgagcctgagctattggttgagcattaataagcctataagtaattatttggaaaaggctataggacagggcaggacaaagaaggttccttttacaggcagcactgttggggacagactgagggctcctaagaaattgctggctagacagtcaaagaggtaatattccggttcagtaaaaatcctgtcacagcactgggtgatgagtgagactctaatatccctatgtaagtcattacaccagagacactttcatatctgtgatcactgatacactactcacagtagccaaaatatagaaccagtctggatgttcatcaacacatgaatgagtgaagaaaatgtggtacacatacaaaatagaaaaaacttactcagtcataaggaagaatgaaagtgtgacaactgcagaaaatggatagatttgaaaatcattatattaagcaaactaagccagactcggatagacaaattgaatgttttctcacatatgaaggttataataggaggaatgggtgcccttgcactcacaagaccacaacagtagaaagaggattatgagatgaggactaaggagaaacaaggaaatgaaacatttgtgtcataaaagcaaaagagggaattatttgagatgaggggggaaaaaaatcaaaaggtagatgggggatgaaggagatgattaacaataaatcacacacacacacacacacacacacacacacggggatcaggcttcagggaaaggatcacaggtcccatgttggaccaagaagatggcaaaaagaagccccttgaaacaacctgagtaggccaaggatacaatgagggaggctttaggaagagataaagagtagcagacgaatctccagaagctaaaagccaaggccatggtgaaggaccccttggctagaggtatgattataaaatctcgcaaaagtaaactgtcccttatacctgagctaaaggtaagccccttccattcctatttaaacatctagattccctgaagtcatatctttagtcacctatagctagaaaaagggttatcccagagcctgttacactctgtaactaacttttgtaaagtaataacatgaaaatgccaaaatgagacccaattctttgtacattaaccaaatattaatttaaaatttatgaaaacaaaaaagaggaaaaaatgcttctcaagaatgagccagcttattagtcagaaaagtgttttggagccaggcagtggtggcacacgcctttaattccagcactccagaggcagaggcaggtggatctatgtgagttcgagaccagcttggtctacaagagctagttccaggacggcctccaaagccacagagaaaccgtcttgaaaaacaaaaaaaaacaaacaaaaaaaagtgctaaaagtcatgttttgttttatgaaacagggcttctcctttctttttttaaagatttatttattatatatacagtgttctgtctgcatatatgcttgcaggccagaagagggcaccagatttcagtacagatggttgtgaactaccatatggttgctgggaattgaactcaggacctctcgaagggcagccagtggtcttaaccgatgagccatctctctagcccatgtaattataatccttttttttttttttttttttttgctttttcgagacagggtttctctgtgactttgaaggctgtcctggaactaagctcttgtagaccaggctggtctcgaactcacagagatcagcctgcctctgcccctgtcttctgagtgtaattataatcttaaaaggtaaattttttttaattaatcttattatgaaataggcacagctttttaaacactagcaaggcatttttattctttttttttttacaattttttaaaattaatttttatttaaattaaaaacaatcttattttacataccaataccagctccttctccctgttgacctcccattcctaccaccatcaccccatcccacacccacaatccactccccagggagggttaggcctcccatgggggatcatcaaagtctgtctaggccctccccgatgtatcttcattctgttttctatagaagctcttggggggtggggggacagttgtgtctgaagagttgatgggtgaattgcaagaactgaaggggctgggaaaagcaagtaacaaagcagaaaggacaaacaaagaagtagaaagctgggcttttgagcaaaatcacaaggtaatattttattgctggccgttttaaacaacaaaagaaaaagacaaccttagaagtaacttcaaaggctttcaggaataggaaggtaggtttcattcttggactagtgagaaagagaacagaagaaaatctaatccaatgtattaggaaggacaatctcataagatcctgccaatgttgctggttctagaaagcattcaggaagttacacactgggaagaaaaggctcagcacttgtttctctgtagctcctcctttattccattgcttctttttcttttctaaaggtaaggtctcatgtgcatcccaggctatactgttactaaggatgacctggaacttctgatccttttacatctgcctgacaaatactgggagataaggcctttggaccatacaggtttgactccaagcactaggattacaggcctgggacactatgccacttgcttttatcattttagcactcaactttgtaaaagatatatggttcataaatttaaaaagcttttgagtcacacacgcacacgtttttatactgggtgaagcctgacaatggaacaaacactggattataagacactcccattaacaaacaacaacaaaaaaagatacaccatatagttttgacttttggtactaaacctaattagttgtataaccttaaataagacttctaacttttagaacttgttttcctatatgaaaatggtaaggtacctgtattttcttttcctaagccttcttacaaaaaaaataaaaaataaaaaaacactgatgaataaagtaaaaaaagtacattatgtgtagactgcttgctttgatgattgctgtaagtttcctgggatgggtttcctatttctcctgcattaacttacagaccatgagtttaaacaattaaaggaactatgaaatgcactgaattagttgcaacaaacaatataactaaccctcctttgatttctctgtaaactgctaatagcatcacctatttctgggatactttttcaagaaggcaagcttgagcctggcttgatgacacacacctgtaatctcagaacccaagaggcagaagcagaaccacctctgcaattttgaggtacacctggatctacacagcaagttccaagccaggtagagctacatacctagatcataaaacaaaggagcaaacgaacaatcaagcatacccattacaacaaacaaaacacctaagactggaaaatccctcacatgcactttcaaaagctgagttatttacctgtcgaactgccagagcatattttattcccagcagaccaccatgtctaacttcccactgttcttgggtcagtaatttcagaagcacatccacagtcttatgaactcctgtttcattcatgtgctttaaaacaacacctaatgtttgagcacaagtttcacgaactggtgctacaacctatagaatagaaaaaagtcatatatgcaaaaaatttctcatgtagaatttacaatttgggcaaagcttcactcagatgatacttacttcatcagaaacaaagtccccaaatctgtccaaggcaaaaacacaaaggagtctaatgactaagtcctccaaccactcttgatgctgctgaatcatctattaagatacaatcatttttaataataggtaaaaatcaactcagtactaggagtataatggaagtgttaggttcaaaaaaaaattacaatactgggtgggacagactatcttaacagaataaagttaccaaactgtggaagagttccatataccatctttagatgtagccatgtcctcttattgattatattcagaaacactacacttatattcatggttctattatgttatacctgtactcttaaaactaattataggctgggtacccaagaggcagagaggcagatagatctctgtgagctccaggctagaaaggtacagggagatccaggccagccagggctaaacagcgagactgtttcaaagacccgcccccaccccccaagaaaacaagggaaaaaggattactttagattactatgtatcaggtcttctgatatctatgctatcccagtgtttcttcctacagacatgttgctcagggatcattaccattttcttcacctcactctactctctactgcattatattctgctcaaatgctcctttttacactttctccaccccagtgtttctgaacatctgttccctagacttaattctacaaacttccttttttttaaccttttcaaagtacttcctcttaccttgtattcctgctttatggtatgcaacttttgttacttcccccctacattggaaagagactgactactaaataagtaataattttatacttacctcttctaaagtgctgtctcccattttaccaccacttttcccatgagctttaagaatttctctaagtccagtacctgccccatgtcgaaccttaaaaaaaaaaaaaaaaaaacaaaaaaaaatgcaggaagcaagtatcagagatcaaatgtttaaagaagccaagttcaatttttctttagtatgaaaatgttttccagtcagcactgatgctacagaaacattaaaaggtaattatgtctatctgtctgcctgcttgccttccttacttccttttgccacaatgttttactttgtaaccctcattgatctgagagctgctatgcatacaaggatcgccaagaactcaagaagattggcctgcttctgcttccctaaatgctgagattaaaggcacatgccaccacacttggcctataaccatgtttttaatatgcatttgtactaggatacacagaaagtaaaataagtgataccttttaggactgtgtttttcaactgagacaaattattttatttcacaacttttttggttatatggaaggttttaaaagttgagaaagaaagtagttattctccaactctagccaagtaactaactctacctggctctcacacccacccccagccactagctgcactcagaactaaacagcaaattcctgtatatttttctatctaggccaaacactaatattttagtacatgcattaaaaacaaaaacaaaaatggtcaagtgccaaaagagaatttatacaagatgtctaacgacaaacgcttccttatagcctatggataaatctccattctcagagatgaggatactcttacatgttatcagaaggggggggggagccaaaatgatactatactcatttatttaaaaagctaagacttacttaactttaaaaaagtattcacagcaggatttttcctccttttcttttcctttctatgctgataacacccaggcagggcctcatacatgctaagcaagtgctataccaatgagttacatccctaggccccaaagcctcctttgttaattcgagggctagctaaaggtttgacataaccaactagtaattcaaccaaaggcttcattttcaccttttctacatattggaatatgtttgaaatttaaaaattaaaaaaaaaaaaagaaagaaatactttggaggttaaattacttctgaaactggtttgaaaatgactacctcatcaacagccatgccactctggatgtgcccaatttggactcaaaactttttgttttggtggtgatagatttgaggtttgagctcagggccttgtctatgataaacacaggattctgtacagcttctatacacacccaggcactgaaattactactcctggcaaatcaaaactgcccactgtaggcatgatatagtggtgaacatttgtaatcctagaacttaggagactgagtcaagaatatcacaaggtcaaagccagactgaactacaatgacactgctaccctactccccaaaagctgtccattttcaatgaaaaataattttttaatctctatgagaaaaatacaagtttttatggtagccaaaagaattaaaaatgaacttaaagaattaaaaattagaaatgaactatttgcttcagaacataatttaaaggatgagaaaggtttaaaggaaatctaaaatattctatttagaagtcaaacctcatgtggtagagtacacttttaatcctggcacgccggaaggagaggcagaggaacctctgtgagttcaaagccagcatgagaccctgtatcaaccctaccccccaccacaaacacaaaagagaaagacaataaaactatataatatgccctaagtcctaagagagctgcaaagggaaaataggaatcttagcaaactttctattcttggcattgtttcctttgttaacaccaaacagaactcagaggaagatgctttacctcccaggagggattaaaaaggtcattgcaaagttcttcacagaagctttccaaaggccattcatttgtctaaataagaaagatataattagtactagatcaaagctctatgccaacaatttaagaaattcaacaaagtgtgtttatttgcagcattagcaataacaacaaagctttaaatttttaaaatgttttactaacaaagtgttaagacatttactaataaatttctctttgttgaccaataacacaatattctcaatgtatacatttaagaaacttataaacaggggctggagagatggctcagtagttaaaaacactggctgcttttctagagaacccaagttcaattcccagcactcacatgacagctcacaactgtctctaactccagttccaggggatttgacagccttttgtgaattccatggacaccagtcatgcaagtggtacacagacacacatgcagcaaaacattcgtacaaataataataataataataatcttaaaaagaaagttataaatacgttcaatatacctcctcaattaaggaagaactttctggaacattatcaatcaagactttggaatcatttgcagtctgattaataacaacatttgctactttccgtctcttctcttctggctctccatcagtgctatcattgctaaaaaagaagttaattttaaagtaaagtaaggaaaatatgaatgatccacaacacaagtaagaaaaatccatcatctacatggacatactaattttgcttatgtagtttagttaaaaaccttatgtgttgactaaaataatgaactcattaatataaaatacatcccactgttctctaaattggtgaatcctttctttcaaattgaatctcaagtctaacattattcttttagttctataacgagttccctttaattttaaatcctctaacccaacaacttaatctagcatgacattaacatttttaggcttttgcaacctagagaaaactaatatgccaagtaatatacgattattagccaaaggaatatgattaaaatatgttgtatgaaaaatttttttaaaaaattagaagtatacagaaactgaccactgataaaaagtatgcagaaaatttaagaaaagtactgttttataacttgaaaaaaatacaaaggctagcctaatgataaatattaaaaacaggaagacatgtaatattacttttatttaatctgggtgtagtagcacataccttttaccttagcaacaatgagatcaaggccagcctagccaataacaacaacaacaaaaaaaaaaaaaaaaaaaaaaaaaaaacttcctttatatgtcattaaaagaattgaaaaggtcaggcattgatggcagatgcctttaatcccaatactcaggaggatctctgcgagttcaaggccagcatggtctacgaagaaagttccaagaaaagaattggaaaagtaatgtaaagtatagatagtcttactttttctgaatttttctcctcttacatcatattgtttttgtttgttttttgagaaaggatttctctgcatacccctggctgtcctggatttagctctgtagaccaggctggcctccaactcacagagacctgcctgcctctgcctcctgagtgctgggattaaaggcgtgtgccaccaacacccggctctgtctctgtaccttaatagtgtgaaagggactgaagactccatcacctcaccctgttctttactaaattctctatcagggtacactggtgagtcaccttagatctttacacttgcataattctacttccagacattagcttttacaattgcatttggaatgtctcttcctagaaagtttcttaggaatgagtacccttctttcagatcactattctaatatctgtgaaggccttctagaccatccaatcaaaaatttccaactccgcttccccttctgtggtggtttgaataagaatggcccccataggttcacatatttgaatgcttagtcaccagtgaatggcactatttgagaagggtttggaggtgtggccatactggaggaagtgtgtcactggtaggtgggatttgaggtttcaaaagcccatgccagagcactcatatacataaaatatatgaaaaaaaatcttaaaaaaaataacctctagcatagatttctatcaaataggtttattattttataatacttgtaatatttactaatccataacttactcaaatatttatgcataccatttgagtttgggtttatagacacaaggggcctacaaatctttaatttaacaagtactttcagagaacaatctggaagatgtagttttgaactagctaccctttgaggacagataacacttttattaattcaagtaaataagacaattactctacttcagaattcttttctacaaaaagattaaccaagcaagtctagattatcaccaacttagcatagtccctaactaaagaacaggggataacacaatgagagtactttaacttaacaagtccatcatcttgactggtgatccttagagcacctctctgaattcattctctaatgtttccatttgatacacttcagccatcctgtctatcctatagtgaagccatttatactccctgtgactggaatgctgttcccatgtcagtcttcagtcttcctgtgaggctgaaaataactaagcaaaaaaataaaaaaataaaaacaaaaaaattctactcctatacatttttctacagaaataatctcattccctgtaacagtactctgtcctgagtaaacaacccaagcagtactattcagctgaataaatattaaaacttacatctgtaaatcaagcacaattactgtttcaagtgaataaacagaaagattactacctcttctcattggtttccactgcatccctggatctctgttttgcaaataacttggccattcttttagctttgttcttctgtctattactcattccggctcggaattctgaatctatcaattcagctgcctggagagcctaaaagaataaaacaacatgtttaaacagtcagaaattaaaataaatacctatggtttcaatcttaggaaagaaataggtatataaatatacagagattaagcattattttttataacattatgctattatgttacatggttgtatcatgattttactctcaaaccaggtgtactgaaacacttaaaatactaacacttggaagggtggaggaagaagagaaagctagggctatctagtaaggccttgtctcaaaatcaaaaatgcctttaatccgtcagcctggtctacctattgagttccaggacaaccaggaacacatagaaagatcttatctcaaaaactaaataatttaaacttcaagaaaaatctttcttaattatctaattcccaacagactaagtcttgtttcataactcttttaaactacaggtatggcataaataatcctaaaaagaagagtgtttctgaagagctgaaacttcaaaataatcataatatcatcaaaagttatgaaaataaaattcccataaaagaaaccaatgcttatcatgtggggaaaaaaaaatttagtatctgtcatcaacttagcacatgatcctttcaccttagccacatcctgcttcttttgatctttttctactcattgcataataagcaaatattaaggtgcttgtctactcaggaggctaatgagtccagaaatttgggcctgagcaacataataagaatcccagcaccttggaggcagaggcagaagtatcataggctggagaggcagagaaacacagatggaaaaagatatactgtgtttatatcacaaaaaaaaatatttttaaaattcatttctgaagctgggcagtggcagtacaatcctttgatcccagcactctggagacaggcagatctctgtgaatttgaggccagcctgatctacagattgaattccaggatagtcagggatgggggtggagggagctgtaaagaaaagaaattcttttctgtatctattctaagaattacctgaaattgtaaccacaccagtaaggattactagtatgggtgcagtgttgaggtcttggaaccaggaaccactggcacatgacaatgcagctatagcatatagcaacaaaaacctttaagaaatttcccttaaggggtctcaaatatgcaagaccaacctgttaggactaaagcctccccaacaagttttgctctgtagcacaagctagcctagaattcattatgcaactcaggctggcttctgtctccagagttaggggattattacatacaccattgtacctgaccagaagcaggaaatattaatggagccaaagggacctaaaagattttagaggataggagaatgagtactgaacctcttgaaacataacatttcacttgtgtgtgaaacagagtcacagcctttagagcttcaaaagacggtgtccaaaatggaagataatgcgtactgggaagatagggaaggagatggaaatggatctgggaagagttaggggtgggtaggaccaaaatatattgtttggaattctaaaataattaataaaaacatttatttttaaaagttcaaatgcatccactgacaattcaaataaagggaaaaaaagagaaagtgaaactatgactcagccataaaatggaacaaggctgtcataaaagagagtcagcaaagtgcccactgtgtaagcgtgaggacttgagatcacgttagagtcagacacaccaggcagagactggttcctagggcttattggccaagcaacctaatgaagggatgagctccaggttcaaaggagaccttgtctctaaaactaaggtaactgatcaagaaagacaatagatgttgacctgacttgtacgtacaagaatacacatatagtaatgcacccggaaaacctcatgcatacacccacatgaacacatatatatactaaacacataaatgtgtttaatctacatatactgatatactaagctatattaagtggggaatggtcaatacagtctaaatgaacacacacaatacttgggtctatagaaatttctctgttcacttggataacaaaatgaagtaaaatctttgtgttgttacttgcaatcaaataacccaatgttttacctacagattgtttgtttacaagagctgctgaagttggggtgtaatccaaatcttcatcgttgaagagttcttcagtactcattccaatagcttctcccatattaagtccaagtttcttctgcaataatttccgttgacgtgctattctctctttaggatccacttcacctataaaaagaaaatacattccctccaaatcagttaaggaagtttttcctatgtgcacatcagactcccactatattaaaaaacacaaactgacatttgctaggttaattgcaagtggtaccacatgtctgtaattccagcactcagaaagctaaggcagcagtaaggggccaatctaggttacagggttgaggttaagttttgaaatatcaccagcaaaatatcaaatccttcaaggaaaaacagtaaaaacagaattataccaaaaagatggcatttcaaaaataaaaacagagggagctggagagatggcttcagggttaaaagcactggctacccttccataggacctacatttgattcttagtacttgcatggcagtttataactggttgcaaatgcggttctatgggatccaaagcccttttctggccttctccaggcaccagtcatacatatggcatactcaaggccacaatcctgaataggaaaacatttattttcctgtgaccacccctttttggttttttgagatagggtctccctgtgttgcaacctagactcaaatgatcccaaggagctggcattgaggtaggagccactgcattcaggcatttatttacctttgtatctaatatattctgttagcttaaagataatgaatgagccagttacctagccaaggtttgattttaattttaatttcagttttttactttgcacacaggcacaagatctaacactactcaaaacataagataatacaataaaaataaccttcaaattcccagaatagtaaaaacactgccacattctgtattggttctgattaatccggctttagaacaaccactattggtcactttgtctacccataactcccccataaataaaaatttcagtcaatacacatttcatgattccttatatattaagcagcacaccaaacgataaattagcttgaaaccaaaagttcgcttctccaggactattactaacctgatttttcatcttggacctcaaattctgcaccagcagaccctaaaagtgatgcaccatgctgtaacaatctgcatatatcaaatctgtcaaaatttaatcgatctgtagtagatgaatcttccatagaactttctgtaggttctagacaaagtttaaaaaatattaatttgaccatatagttaaagtacagaatgaaagaacatggcatagcattacttgcagtattgtctaacatttaagaaaagcaaagaaatagaaaaaccaccgtgatttatctacaatcacttcttagctatctgtgaatcaattattaacttggtgactccttctacaagccatcaaagtgttaagtggtatgtgtttctaaccacgaaagcatgttatatgaagaaatgcttctgtgttgacctatatgttaaatatcatactttaatttattgtttaagggtttaaaacctacagttacagtatgagtttattatactgttaaatcagaagataatcatgcacaaaatatattcataattaagtaacaaacattgtctctccctatgttggagaaatacaaacaactactcatttaataggatacaaataactactcattcaataggacttacttttcatattctaattggaacctcatgacaaactattgaaattatacatccatttgagaaccaagaatatcttcaaagtgttctacattctttccaaaaaagatcaactatacatgccaaactataactgcttactaacacaacagttaatctggcattttcagtcatgtactacaaactatagtgtaactgatttaatttaaaaaaacaaaacaagcctcttttgggtcttggctccaagatgaccaataaaagaagaaataaggtcgtgccaaaaagggctgcagccatgtgcagtcaattcactgcatgaattgaacccagtgcatacccaaggacaaggccattaagaagttcttcattcggaacattgtagaggctgctgctgtcagggacatatccaaagcaagtgtctttgacgcctatgtgcttcccaaactctatgtcaagctgcattattgtgattactttgtgagctgtgctattcatagcaaggtagtcaggaatcaatctcgtgaagcccaaaaagaccaaacacctgaccaccacgaatttagacctgctggtgcagaaccacaacctccacaaaagcccatgtaaagaggtgacgagaaaaaaacagaacaccttagaaaaataaaatgggacttgatggggaatgtactgtgtatgtttatcttattgactgttaaataaaatactgtttggccaatgaaatggcaagttaggcaggactaggagtcaaagaggattctgggaaatgtagtagagaagtgatgatccagacaggaaatgacatagcaaggagactcatatttaagcgaaggagaaacagaaagggtccttttttccccttcctcctccatcggcaggatgtgagccaccggcaaggagggacaccaataaggcatccgataagataagtcttataaaatatatatttatgataattgagactgagctaacagatgagaatcctagtcattggccaagcagctttgaacctaatacaagtttctgtgtatttatttggacgtaactcgggcaggcggctagcgtaaagctcacacgtggcggtggggctcagaggcttttgacagaaagatatatcataacagggacttatatttaaaaaaaaataaaaaacccatgaatgttttctagtaatgataagctgtttcactattatttttaatgctaggttaatttaattcaataaaatgaactgtattatgtctatctaccaagataatatggggaaaagctggaaatgaaaggttctgtctttacatttgataaaaggcaaattaacacaaaaattcaaagtaacacatcagaaaataaaagcaaaaactttaagaaagataagatttatgcaaaaatactaaaatgaatctagttgctccttactgaattctcatttagagaacatttagtttatcttatgaagtagtgcacaatgctagaataaaaactcaaccagcactcaggaggcagaggcaggtggatttctgtgagttctaggccaacctggtctacaaagcaagttccagcacagccagggctgctacacagagaaaccctgtctcaaacacaaataaacactcctggaaactaaactggacagtattcataactgatactgtgttgatggagtctaaaacacaaaatttagataaaataatacataataaaagttcacttacggccaggctttggtggtgcacgcctttaatcccagcacttgggaggcagaggcaggcggatctctgtgagttccaggccagcctggtctacagaataagttctaggacagccaggcctatacagagaaatactgtttcaaaaaaattaaaataaaataaaatcacttaaattatatgccttatattgcctcaaaggcatatgctttgctttaaattatctatacaggcaatcataaaataagtactacaatcctttacaacaatacaacattcaaagagaacaacaaaaaaacactaatttgggatagcagtatagctcagtagtacaattcctgcttatcatccacaaggccctgggtttaaccctaacaccacaaaatcaaaaacaacaaacaagaagacaaacaccctacaccgaggagggacatgactaaagagttagcttgccaaatagccatacataaattttcctgaagtttagaaaatatcacactatatggtttttcaaagaatagtaaaaaatgaattgtttcagatatttataccatattcatccttgttgggaagtaataagtttagtaccctatatgactaaatatttttagaaatatatatgaaaatattgtttatccatcagtttctttttttaagtttagtggcaaaaaccatcttattcaatattctttcctagcaaagctgaacctgaaaaattgaaaattaagcctttaagtcaaaactgaaatgattaaactacatacttcacactgtagttaattctacagctatgttttatttcaaactacttttccactttaaaggcaccttgtttggttcttggcactggattccactcgggcacgtttttcactatagcttcaacagcttgtcctgcagcaatccgggtatcccaatttgcactccttaaatatattaataccttcaaattataaaataaattacatatcaaaacaaaagcttgttccaggtaacaagaaaaaatattaatttattaatttataatctagggtccttcaaatataacacacttagaattattaaactaattcataaagtttttgattattcacaaaaatattactatcacttttttttttttacatttactatatatgcatgttggaggttagaggacaatttgcagaagttggctctctccctccactatcagtgctcccgtaactgaactcgggttatcaggcttggcaacatcctcctttatccacggagccatttcttgcgccttcactaccatcttcaatggggaaagaggaaccagatataatgatgcacatcattaatcccagcactcgggaggcagagacaggtgtctctctgtgagtttgagaccagcctggtctacaaagcaagttccaggacacctagagctgttacacagagaaacctgcctcagaaaaaaaaaggctggaggggaggggggagcccggggcctggctaaacaacacaagtaataaaaatacatgcacctctccactcaccttacagatgagtataataatgccgaatatgtatcctttaccatctaagaatgtggggtctataggtatcaatcagtctctccatctacatcttggttagaaattcagatagtatcaccattagccctcatggtaccaatcacacaatacatatttgtatgtgttgaaaggggatttttttttttttctagactgggtttctctgtgtagctttggagcctatcctggcacattttgtagaccaggctggccttgaactcacagagatactcctcctgcctctgcctcccaagtgctgggattaaagttgtgtgccaccactgccagcgaaaggggatttataactctgactcctttgcatcaggcagggagagacaaatgagaatgaaaggatgatagactagagtctagtcactagactatcttagggcttccaatatctagacaatcatatgccctcaccctgacctctaaataggtagttctcaaccttcctaatgcttttaacccttttaacacagttcctcatgttgtggtgacacctaaactataaaattattttgttgctacttcataactgtaattttgctactgttatgaatcataatataattatctgatacgcaacataatcttaacccccagtgagttaagaaccacttccctgctcccaccatcccaaagtattactgctttattctgcatgccagggaatttaacacgtgaaatttatcaaatattaatgtagaggtacatttcagcatatccacagttaaacaaaaatacagccattacataggaaaagacatgtactaggactacagaaacactgacccaaagcaaaaatttcccatcccaaacagctcaactagcatcatatatccaagtattgcccatgagcactaatccatttgaagactaccacatatcatataattattagtcattaagaacaagttagaccactaacaaaccagattaacaacttagttcattaccaaactgggtcagattcaagttggttgctcaagcaaaaggttcaatattgacagatctcttaaacaaatcaaattgatttaaatactttttcttacaagcaaatagcaactttgaaaaactatttggagagctaaagatatttaatggaattcagagaatacaaggttacttaggatgattttacctgtgctgttgtttctctgccatggacaagtctttatacttgtgttacattaaaaaacactgagttcttaccttagataacaaattgtttagttcatgaggatgaagcttcactacttctccaagttgctgtgcagcagcttttcttgtaactggagtagtaccggtatccaataagataaaaagacgatcaagtctataataatagcaaaaatactacagttaatctgggtgtttcctcataagcttgaggcagaaaatgtattaaacatctctgaagccaggcagtggtggcatacgcttttaatctcagcactcagaaggcagaggcagaaggatctctgtcaattcaaggccagtctggtctacagagcgacaggctccagggacacagagaaactctgtcttcaaaaacaaaaacaaaaacaaaaacacctctgaacaaagccttgtgctgggagtcaggcatggtggcatgtacctgtaaacccagtaactgagaaggaacagaaagatcaagagttagacacagctatgtagcaaattcaaggccaacctgggctatgcaaaaccttgtcttgaacatcaattaaaaatgatctgtaccatggcaataagatagactatctttgctctcaaggaagaaggaacgggagcggcaataagctgagtggtggttcacaaattcaaggccaaccaaggctattatagtgagttcaagtccagcttgggctccagagaagacctcaaaaatacataaataaatgaaatttaaaagaactaaccataggaaggaaggaaggaacttgcaaaacaaataagatggcttggttataattcagggtaaacagaaaacaggatgaccaggtacaactactagcacttgggagggagcagagacagactgttaagcttgagggcagaaagtgttcccaaccagccaggactgcataaggagaccttgtctaaataaataaacaataaactaatgaaaaagggagggagggaggagggaggagggagggagggagggagggaggagggagggagggagggagggagggagagaaagaaagtaaaggaaatatagtattctgcgaagaaaagaaaatacacttacagaagtaacatgaaaaacttgattgtatggtgcaacaaaaatcttggctcaagaaaataatgggccggcagggcatagtggtgcacaattatgtcagtactcagaaggctgaaataggatgactgtgggtttaaagccagtctggactacataaaaagaaagcaggaaggagacaagcagaagagagcagacatggtgcactaagttatgcattaggaagattgatctggcattagtgggaagccttgtagagaactaaaccacaatcctaacagaaacacaaagaaactagaagttatgatacagaagaaaaccatacatagaaacaaaacatacatagtgtggtaattaagcaaagcatcatggtgttgaaagaattttgagattttgaatcttagaaatgaagatatcaagcagggctttgtgtacatgcttataaccccggcacttaggaaagctgggcagaatgatcagtttgagggcgacaccagcctaagctacacctagttcaagaccagagtgggctacatattaagactctgccacaactccccatcacattccacctcctaaagagaaaaaaggtatcactttttgagaaaaggcagtttaaacacaggaaaagatggcaagctcactagtagtaggcaaagtatagctagaagagcacaaaatgatagttggaatagacagctagcattccggagaaagttgataagagtcatctgcacagagatgatctgcacagaggtgataaacatgacaacatattcctgagtttgtaactcatatgggataatgtcacaaacccaaaccctagttgtgctacttataaacaaggtgtgcaataaaaccacaatagattatgcctagagtaaacagtgaaggtggacaaagtcaaaaactacaccacttatctacaagtcacacagtagccttgccaccacattaacccactgaagtaacgttagtgccatgtttatgaaaggaggcttcatatttgggataaatggatgggaacaaaaggcaagattaaaagaactgcctatctgacacgagggagagctactggatataactttacattttatctgtaagaaagagaaaacaaacaaggtcccaaagctaggcatgaactttaagcatcaataaactaagaggtttataattcttctgtgattcttcttatctcacaaagaactaaaaagttacaaagttctgaaagctttttatttaaggaaaaaaggaagagaaggagttgaaagggaaaagaaataaaaagactattagaggacaaatgaaatagatgaaatttctttcacactaaggatacacagatcagttatcaaagtggtccatgcctttaatcccaacactcagtagggagacaggccggtggatctcagaattcaaagccagctagggttacatagtgaggcagaaacattatattttaaaaatgattcatattgctggcagtgatggtacattctaatcccagcacttgggaggcggaggcagaggcagaggcagatgatccctttgagttcgaggccaagctgtactaaagaactagttacaagacagccaggactccacagagaaaccctatctcaaacaccaagaagaaggggaaaaaagtattcataggaagcataaaatcattataaatagttagaaatataactaaaatacattttcagtcaatattaatagtattgaaatgttcaactatttcagaacaaaatgctgacacatggtttatgtcttatagtttttaagggtattgtaaggaagataatgctcaagaaaatttctttaggcaattaaaactaaaggcaaatgaaaaataatataacagttaaagtccaaaatatgcaaaaattaatttaaacatatacagtgcatgtaggcagtatttcttcttgctcattcacagcttctaaacacttgcctttacccttttgtggaatatttttggaaatatagtagaagcttcaggaggtgtgcctagctgaaggaagtagatcactggggatatgtcttcaaatggttatctctgcctctctgttgtggtgacattttgtttatgctacaataaataaagcttgcctaaagatcagagtgcagagctagccacactagttagccatagaggccaggcagtggtggtgcacacttaatcccagcactcaggagacagaggcaaagggatctgttagttcaaggccaccctgggctacacaagattgaatctgtctaaaagagaaacagagttctcacaaaagtgatcccagcacttgggatcccacacctttaatcccagcacttaggaggtggagacaggagtaatatggctgggagaagagaggaatataaagtgggaggagacaggagctcagtgcagtatgaataacagtcaatctgaacatgaagtctgagaagatggctgcccctttggtatgagcattgatagagttaagaactctagtggctggccgctctacttctctgatccttcagcttttaccccaatagctgactccaagtttctaagagaattcttgctacactccgtctcgttcttcctttcctttctctgcttggggtgagcagtcctacactaccatgtctgacaggggatgccctcctgtatgctgtgaatactggttgatgaaaaaagctgtttcagccaatggataggcaggatttagccacgtgggaaatccagacagggatagagaaaggtagtaggtaaagaagacatcatgtagctgctgaagaagcaagaggcccgggcatcactggtaagtcaagaccacatggagatacacagattaatagaaatgcattaataattaagagagagctagtcaataagaagcctgagccatcacccaaacagtttacaattaatataagcctctgtatatttatttggtactcaatggctacagaaccaggcaggacagaaacttcgtctacacatgccttttactcaagctattctgccttcccataggctcacacaatggagccagccagccatggactgtgacctctgaaacagtaagctgaaatagctttcttttgtttttgttttggttttttgtttgtttgttttttgaggcggggtttctctgtggctttggaggcttctcaatagcttctttcttgaagccatctctcaaatacctggcacaatgacaaaacactgattggcacatcattccttcactggtttttgctaaaggattagtaggaagatttagaatctgatacaaaagaaaggaaaactgttgaggaccatcagtattcttaacaagtcctaaggtaagctcagacttaaaatcctttcactatatataatataaactgattcccttactactccattttatatgtgattctcaggtctgagccctttgacttgttttcacgagactggtatgtcatagttcatgagcgccctctaaatcttcgaaacaaatatccttggagatgataaaacacctgcatgttgcaattctgaatgcctcaagttcaatgatgaaaaaaaatttcatgaaatcttaggagaccaacaagatgacttaactgagcaggtaaaagggctctcgaccaagcttaataacctaggctcaatcctcagaacccacatagttgaagaatcacaacttgtctctgatctctacatacataccatgatacatgtacagcctgtcccccaaaataaatgtttttaaaaagaaattttaagcatgcaagaacagataggcaccatgacaaatatccaatttttttaaagtctccctttgaaatccaactaaatttaacctcctacttaaagtctttatttaacaaactgcaacctcacttggcccagatatgcattttaaatcttaaattttatggaaggcaaaattgccaaaaattaaatatttaagtagattttattataaagaaatagttaaaggagctgggagatagcacattgggtaagaacacttgttaggcaagcatgaaggctgaatttgaatccctagcacctatatttttaagaagctgggcatgttcatgtatgcccctgtaatcccagggctgtgggagtcagtgacaggtaggttgctgaggcttgctatctgctgacctagctagtagttcaatgagagactctagctcaagggaataggtggtgaatgacagaacaggacacctgatattttcctatggcttctgcaagcatgcatgctacataacttgcataagccacaatgacacaaagaattgaagctcaaatctttaccacaaagatttatatttgtattctttaaaataatacagatgctctcatacaatgtgtgcagttcacatcaactgaggacttaactgttgagaaaaacacccccacccccaagaagaaatacactgaagttaagagacctctgtcatttatagttttggttttggtggtggtggtggtttgattccccaccacctcagagacagggtttctctacatagccctggctatcctagaacttgctctgtagaccaagctggccttgaactcacagatccacctgcttctgcttcccgactactggaattaaaggcatgtgccaccattacctggcttctgtcatttgttgggagatcctgccaaatctacctaaaattttacttaggctcttcttattttggagtatagaactagacagtatgtatatgacagtttaacattcttataaaagtttctgtatatttttaaccactgataggtttatcatatcttttatttctgtgattttttttaatatgatcaaaagcaaggctagctgcaaaagaagcactctaaagaagagtcattaccaatctatttgtaaatccatatacagtggaacacactttagggtaagcctagtgctcacctatctgtaaggccatgtcttgacaccattaattactcttctagcctcaattaccctttccccagtatctggtcacaataccggtgtcattaatccattctctctaccttccactaactatgcaaagatttccttcctccctccctccctccctccctccctccctccctccctccccctccctgtctctctctgtctctctctgtctctctctctctctgtctctctctctctctctctaacattttttcattaatttattttttgcattccaaccccactccccctccccacctgcaaagatctccatctctattttctatagtatgttcctttagggccaaacatcttcagcaaatgcttaaatattaaatacatttattcctggggctggtaagacaactcagtcacttgcccaagcatgagaacctgagaacaaaccctagaccccatatttgaaaaggaaagcattgtggtgcaggcttgtaatcctagtgctggggaggcagagacaggtggggtgcctggggctcaatgacaagtcaacctgttcttatcagggaatgtcaggtcagtgagagactgtctccaaaaacaagatgtttattatcttaggaatgtcattagacctccacacatagtacacggacatatacacacacctgataaggtgaaatttaatcctagaaagtctgaattataaacacttgtaggtcaccaatgaacccttaagctccaactctaatagcattttttataaattcaaattttcttgactcttctatgatttttgaccagaaagtgtttattcttaaatcctttccttctcaagttttcattaccttggtagtctccaagtatttctttatttcaccttctattcataccattctttctgtgaaagttcagagtccacacaatcattgattgctcatctcactagttttttttaggaaacttcacactattgtttgtttataaccagtacaaaagagtccccaaattagctcatctacacacttcccactgcctttaagtatatataagtcatactaaatgtgatctagttgtcagattaacttcccatagtatactttgatcaaatcactaccttattctgaaactttcagtgactcaccctcatccaccacatagtaatactgttatattatttttccctatataaaatgtctgccccccaccccccaacaggtctgagttaggtctggctgtcctgaaactcactctgtagaccaagttggactcaactcacagagattggtctgcttctgcctcttaaatgctgggatcaaaggcgtgcagcactactgcctagcaaactttgtagacagggtcctcatgtagcctagacttgccttgaactctcaatgcagctgaggctggccatgaaatcctgatctttctacctccacctcccaagggctgggattacagcggtgtttgaggggtagtgggataatccgtatccaatgctgggctttatacattcaagcaccctaacaactgagctacatctgcagtctcaacaatgtcttataaactgggcttggggatacaggactataatcttgatttcaaactcaactgtgctatataaccaaaatactgtcttggtttcaccagtaaacctttgtattagtttgtttttattgctgtcataaaacacaatgactgacagatgtagcagtacatatcctggaagctcaaaggccagttaacctggcttgtggaacaggagtggagatgacaaaagaccctgtctcaaaaacagtagaggcacctgacagtagtggcacatgcctttaatcccagcattcagaagacagaagcaggcatgtgcatatgagttcaaggccagcatggtctgttaaacagataaatcctgtctgagagagagaggggggggggtagaggcaagtactgacctgagggatagtcctctgttcatcacactcctagccatgggtctttgatacctctctaaccaaatgttgaccctatctattccacaaagttcctcttcttgccctcccccgtttctgcagtctttatcccaatgccatgtcatatctctgctctcctatcagtcaactgccctgagatcatggtctccttcaattctggtttattcttacttcttccaccatagaagcaacctaaattgcctccttgaatagaggaataaacacacaagaacacttctctagtcttactgatcaaagcacttttgggaattccaattcctcatttgagacagcaaattagagaccacaaaaaaggaaaaacaaaggaatgaacagagaaggtctgacaagagggcagacttgcctgttaatctagggtagccagctataagacagatagggtactcatcagggccaggacacagtaatagtgtgaactggtagaggatgagggaaacacatgagataaaagtcagtattacattagacactaggcacaacccttgatgagggaggttagacgaagagagaaattaaagggcaaagggtttgaaacatagtacttttcgtccctccccacttccttccttcctaagcatacccccccatatgagggaatgtttgttatattaatttatatgtataggtgtttacctatatacatctacgcatcttgtgtgtgcctgatgccagtggaagcaagaaaagggtgttgggtcccctggaactggagtttacagatggttgagattcaccacttgagtactaggaatccaaaccagatcctctgtaagagtacacagtggttttaactcctgggcatctctccagccctgccatttttctttctttttttttttttttttttttttgggggggggtatggttcaagacaaggtttttctgtgagccctggctgttctggaacttgctctgtagaacaggctggtctcgaactcagagatccacctgcctctcctccccccagtgctaggatcaaagatccacctgacccccacccccagtgctgggatcaaaggtgtgtgccaccacctcctggatccattgtctgtttttaagacaaggtctcactatatagtacttgagatcaccttgtctcagcctccagagtattaggatcacaggtatttgccatgcttggttaccacaaaactttggtcaagtagggtggcccacacctttaaccccagcactcaaggaggagacagaagcaggcagatctctgtgagtttgagacctgcctcatctacatagtgagttgtaggtcagccagaggtacacagtgagaccctctcttaattctcagaagggtatacagatggaagaaacataacaaatacaaagttgaatagaaggtatcggagactacagagtaatttaaataaaacttaaggtatttcaggctagaaagatggttcagtgcttaagagtacttgtggctcttgtagagatcctaggttcagttctcagcacccacattaagtggcttacaactatctataacttctgtcccagaggatctgaaactcttctggcctccatggatactgcacacatgacagtaatacatacactcaggcatacaaagagtaacaaatatttttttaattaggtaattatatttgacaatattcactggttttgaatctactgatgctaagaaatctagtctgttttcaattcagaaaaatacagaagacatgattcatgtttgtttcaccaaactgacttcaaacaaatgtcctgaaaattgccttaaaagggtaaagggtatatggatgtttgttaaagttctgcaagtaagggcgatgtaacctctctctctggatgttggcaatataatttgtaacagttaaactattaaaaagaaacagaaatcttgtacattttgaactataacatgccccagattacaatttcagctaacaaaaagtagagaagtaaataaacaaataaaacaaaacaaaaaaccccataattccactctatgcctacccgaagagaaaaaaaagaaagaaatttcactggaattctcagaatttaatctctgaaaaagtgggaaaggacaactgacaaaattgctcacaaaagtggtgatgtaatctcagctaagagtgactagcaggactagtaaacatagcaggactataggctagcccagaacacaaagggccataaaataaataaccataaaatgcaatgatccagcaatggtgctggaaaattagctcagcagttaagagaactggctgcatttgcagaggacctgggtttggttccagcagccatacgacagctcccacacagtggacagaccacagcaacctgtagctccatttccagggagctgatgcccttcatctagtcctcacagccactgcacagacaaagacagaaatataagacataggcatgcacatacacatgcacactagtaaaaaaatatttgtttttaaaagaagcaatgagctgggtggtagtggtgcacacctttaatcccagcagtcaggaggcagagacaggtggatctctgtgagttggaggccagcctggtttccagagtgagttccaggataggctccaaagctacacagagaaaccctgactcaaaaaaccaaaaagaaaggaaaaaaaaagaagcaataatcagtcaagtttgcccatttgggtgcttttaagtttttggctttttgtttgtttatttgtttgttttgagatagggtttccctctgtagctctagctgtcttggaactagctctgtggaccaggctggcctttaactcagtgatccacctgcctctgcctcctgagtgctgggatcaagggcatgcaccaccacctgctggccattttgttattttttttttacaatgtaattaattaaataaagtttgatgtagtgattgcctatgctatttaagaaataatgagaacaagtcaggcagtggtgttgcatgcctttaatcttagcacttggaagacagaggcagacagatgtctgagttcaaggacagccagatctacaaagtgaggactacatagagaaacactgtctggggaaagaaaggaggaaagagggagagaggaagggaaggggagtggggatagggaggggaggggaaacgaatgctggtgtgaatgctgcaccaagtacctcatatcaagttattttccacgaagttctctattgttttaaaatatacaccttccagttcatactgagagtaacataaaactacattgatgtttctttccaaataagaacgcagactaactttgtagaacactcaatgaacaggaagatatgaaaccacaaagtgcaagcacaggtggagaatgcttcggttctgttataaattctagtacctagaacacagaagtattccataaatagatggtgaaaaggtataatcaaactatgttattcccttaagctatttttctgaactccacctccatccaacaacttatagtctctttcatgactgtatcttagagataaaaaatagagccaagtgttggtggcgcatgcctttaatcccagcactagggaggcagaggaaggcggatctctgtgagttcgaggccagcctggtctccagagtgagtgccaggataggctcccgagctacacagagaaaccctgtctggggggggggggatggttaaaaaaatagtaaactagactctctgtggcataaatacatgtgatttccaattatatgaaattacatcttggtaagtagttaaagtggcaaattctgttgtggtaccacaattaaaaacaaaaacatggctgggaatgttggtcagtggtaggagacttgcctaccaagcatatgtaaggttctggatttaatatgcaagacagtaaatttagcaaactttaaaaaattatacttttttgagaaataaaccaaatcaataagttgaagtttaccacagtgaaatggaaagtcttctattatatcacctctacattttcctgattgtctctgaattttctaaagaatggaacatttttaaaaatgtaattttttaaaagattttatttattatgtatataacattctgcttccatgtatatctccacaccagaagagggcaccagatctcattatggatggttgtgagccaccatatggttgctgggaattgaactcaggacctctggaagaacagcggcgctcctaacctctaagccatctctccagccccaaaaatgtaatttacaataatacttcctgtcaattttttcttctctcctctctctctctccctcccttctttcctcctcccccccctctcattttttgagacagggtttctctgtgaaacagtcctggctgtctcactctgtagaaacaggctggtctcaaactcacagggatccagctgtctctgcttcctgggtgctaggattaacggtgtgagccaccactgtctgacccaatttttcttttttctttccttttcttttctcttgagagaaggtttctctgtatagccctggctgtcctggaactcattccatagaccacactggcctcagactcaaaaatccacctgcctccagagtgctgggatttaaggagtgcatcaccactgtccagctccctgtcaattttttaaaggctaaaattagtaagggaggaggaggagcaggcataagtaattatttcccctgtccttagcactttcccacatcaaggaacttccttttgtcagcatgtaagctcagcactgagaaagcaaactcagatggctccaagccaccagtttatgggggtggcgatggggatgggaggtaacacttcctcttacttgtagaataggcctaaagatacaatgtttctctgaagtgttagcagtgtagtgagaattagcaagactgagcaaaagttctgttcctatgtaacaatttgttaaaagacatgtttaccttttgtcctccctaaatcttcactagctatatcacttccaattcatagattgaggagaggggcttctaaaataaatcctcaatgttgtcagaatactttcgacattagcttttatgcataagttggagaaaaataataaaaactacatttttttgaagattttatttatttattatgtatacaacattctgcttccatgtatatctgcactccagaagagggcaccagatctcattacagatggttgtgagccatcatgtggttgctgggaattgagctcaggacctctggaagagcagtcagtgctcttaacctctgagccatctctccagccctaaaaactacatttttgaaacaacaaatcaagaaaaaaaacttgcctggctaataggaaaatattactgtacagtcaactcaatcagttatggcataaacagacaactgtaccaaaaacaatcctttttataaatttacatcaggactgtcaaaatagcttatctagtaaagacacttctgctaagcctgataacctgagttcaaacaccaccaccaccaccaccacccacccacccacacacacacacattctctctctctctctctctctctctctctctctctctctctctctaggtgaaagagaactgactccttcaaactgccctttaggtaagtgtgtatcacacacgcaatattttctaacctacattaagcagggcgaggtggtacatgcctgtaagcccaacagtcaggaggttgagagaagagggccaccaactggactttggctttggctacataagcaagaccaaatctcaaaaaatggcaaatctaggttaaacttagaacctaacagttacagaatcactatcagtgaataagccttaccaaacccaccaaggtagccttttctgttctaattctcactaagtaaaagatataacagaagagtgtttcacaaagcaagaagatggaattcaaagatttagcaagtatgactgtttacaagcaacaccacaagctcttaacaagtactttggttgggggtgggggagtgtaaaagtttatgggacaaaatcacgtaataagttagtttagttgactttccagaatccacattttaacagcagttaaaccgttaaattgttttaaattttgacatatatattctttcttgcaagcacctaaagaagacactatcttccagtgatatcttgctgaattttacaaaaaatttcaacctctgcctaagtttgcaatcttaaagactcatttatgcaagattcatatcttcatccacagactgaaagctcacaccttgccacagtcttagtacaataaagctaatccttataacaatacaagcagaatcaaaatttttgatcatatgaaatgcagggttagattatacggtttacatcagaaaaagccatgttataacaggacttatttaaaacaactacgatgctttttgtttgcttgttgttttttgagacagggtttctctgtgttgtcctggctgtcctggaactcactctgtagatgaggatagcctgcctctgcctcccaagtgctgggagtaaaggtgtgtacaaccacctcccagcttgatgatttatttttaaaagcatgatcctgggctctgaagtttagagcactggctcctcttccaaaggtcctgagttcaatttccagcaaccacatggtagttctcacaaccatctataatgggatctgatgccctcttctgacatgcaggtgtacatgcaaataaagcactcataaataaaataaataaatcttaaaaaaaaaaaaagcactttcctgttcttccagaggaccagagttaaatagccagcactcatgtcagtacattcacaataaactaaccccagctccagggaatatgatgcctctagccttcaaggtcacctgcactcacatgctcataccctatatcatatacaggtataaacatacacctaattaaaactaataaaatattttaaactataacctattatttttataaccacatataatataaatatgcaaagctaaagtaaatgtttttcttaccagcaacaacaaaaaaagcaaagctaagtgcctgacctattagtgtactataaacctagctctccagagggagggacaagctgatagctagttgcaggccagcctggggtactgtaaattcagttctaattcagtggtaaaatatttgcctagtattcacaagtctcttgagttcaatccccagtataaccaaacaacaaaaacctgtggctgagaaagtggcacatacctgtggtctcaattatgggaaatggaagtaagaatagcttgggcactacattgagacccctgtctccaaaaagaaaaaagaaaccctaaatagcataagtaaaactcaggaagaaggcttcctgaacaaagtgatatgtaggcattgaggtacaactaagactataatgagtaagatttgagatgggaagatacgtgttccagaaataaagaatgggaggtaaaaacattctggggaaggaagataaaagtgagggagggatgtaagtgcagagagcttgatacaaaaatgaagcaagaacctagagatctacaagaagtttgggaatttggactttatcctaaggcaacagaaagctagtaagttttaagcagaaaaataatagcattaaaatttgcatattagcaaataatacatctgaagtgatgaataaattagatatcggagggcacaagaacgaggaagaggctgttgtgagctggccggatcaatctgctgcttcacctgcttctgcaggtgaaggcatttgacaggtggacctcacaacctgagttctatccctgggactcaaggtagaaaggagaaaaatgactccaaaagttgttctctatcctccacatgtacattcaacacaaacatcactcacaaaaatattttttaaagagatgcctttcaaaaaaaatagaaaggaagaataaaatagagatgcatttctttttgcttcctaactgtgaatgcagtgtggccagctgtctcgtgatcacatatgccttctccactacgatcaactttaccctcaaaatgagccagaagaaaatcccttttctaaagaaaaaaaaaaaaaatggaggggttgctgttgcagatgtcttggactagacgatagagcatagatgactgtgacaaatacagaaaaacaaaaaaactggctgcagaaagtttaaaaagacagggtaggattggatttagtgactggcaggatagagggaatggaaaagacagaagagtcaaagactattccagatttcctcacaaaggaaggaacaatagtaccacttatttcctgctagaaatgttatataaaagctaaagtttctctatagttatacacattgacactatatatatatatatattatatatatatatatatatatagagagagagagagagagagagagactatatatattggagtaggggttcgacacagggtttctctgtggctttggaggctgtcctggagctagttcttgtagactgggctagtctcgaacttaacagagatccgcctgcctttgcctccgagtgctggggttaaaggcgtgcgagaccactgtccggtgcaaaaataattttaattcgattctggcatatgatttccatttctcaaactatcttctgcctacataaaagtacttaaatgagcctccacttccacaataccaagagaaaaatgaagcttaaatatttagcacagacatatgccgagtgcatgaggtcattcatacctgaaactacaaagtttgactttcaaattgaatccacaaatatttttaaacgtccaacaaccccccctcaacacacacacacacaaacaaggtatcccaaagtgtttgcttgaactgacattagtaagccaagcacagaacagcttttataaataagactgactataattttggcagtgaataggggaaaaaaaatacagaaacagaaagcactactctgtgaaatcaaacaatgaggacaaaaagccttcaaagcccactcattctttcaaaaattgggtgtcctaaacgtgggtcaatagattagtgttaagcaaagaagagagaagtctttttaagcactgtcattttgtctctataaagctttccaacattgtacaaaaatatacacctactttatgaaaggaagtactaattcccttaaactagaaaggcctgataaggcaaagcaacagacaccacaactctagtcccagaaccagaaggtggtagatccttttgaattgcagctgagctacatgagactcctaggagggcggggaatgttatattgtttatgtagcaacatatttcttttgtatatatttccccatttacatagaagataaattataagataaagttatctgtatttgcagaaaaaaagaaatgccacttgtattctcttaaagcagttttataggtgctgaaataaaaatctttctcccacagagtggatgaatctgcttatgaaataaaaattagatgtcccgtactactggtacttagcaaccccctttactcaactcccatgagtttctcccacagactatttcatcagttacctagggagtttgagggatgggttaatcttttgttataagagaaaacttcagcacatactgtactcaaaggaatgtgttcaactaattgcagaaaaaggagtgaaagctgtttattttcatcatttacctccttcagtccatatggcgaaaaggactcaattctcatttaagttacttcatcacccctaaagaacttggtactcttttgactaaacacagagcctatcctctgcttaaatgtcaacgggacaccaaaatcatttccaagtttcccaaccggttctattatcagaagctatataagttaaatacttgtaagtttttctacaattttcttggacttccccacagtgggcacaattttacaataatttaagatctatatctcttgcgggtggggggggagggatgctaaaatagtcatctgtttaagactacacgctgatgacggaatgcttagtgccaaacaaaaggaggaattatacctttaaaaaaaaataagaaaggctatacccttaacgctgtaaatgttttaaatttagtataaccagatggtctctcggataacagtatttcaacctcccccctccttcgatagttaccaccaagttttgccgtgaaatggtggttcggggtcagacttagacacgaagagagagagagagactcgcctacgattcaaagagggaagagaaaccacagaagagaaacgtagtgaaggaaaaaggaaaaaagccagctcgaacgcgacaaggagtcacacttgacgaggaaaagcctttcttgagccatttcgccgagtaacccgagcccaaagcgcccgccagccgaggggcgaactcgggaagagctgcgttgctgccccgcgctgagacgccaggagccggcagccggcagccggcagccgtgcccacgcgcgctccccgttagctggccggcggcgacacccacctggagaccgccatggccggcgccggcggttcgcaactcccgggagctacacgccgcgccgctggggcgctcgtttcccgagcagagcggcgcaggcccaggccgtcgggcgcagggcagcgggcggcgcggcgtgtcgcggcccgcacgggccttcgggcatgggccgcccacccgagctcgtctccaacgcggccggggtccttcacacgggcggaggcggcgccgctctgacccgcagcacttcaaacccggtgcccccagccccgctctctgctgacgcaaacgtcgggacgccggactcggcgtcagtgcgccggaagtgacgtcatcggcacgtggggcggcgcgctgtcggcctgctctctcggagcccccgctgcgtccggccgcacctggagcggtttcgcggtgcggatctggacgggattgagattacggagggaagagagaagaggtctctgtttgccagagcaggaagatgattacctcggattctaagtccttccatcctgaccctacccctctaggctgttcccagagaggaacgaactcgggtcgcgatgctttgggcggggtgaagtcgagggagacctgcaaagggctgggtggggtggtgcacgcctataatcctagtacccgggaggctgaggcagcagattgtgaaattggaggtcagtctgggctccctagagatgcccagggcaagaatttgcagtggttccgcgacgaggaggggagcgaggctcaagtgtataccagtatttgccagaagtgctgcatgaatgcagggacggcccatgattttaccaggcctacctcccgaattcttccctctcttcctccctctctgcctgcctgccttctgcttccttctacacactcctctgttgccgactgggcctcttaccaccttaaaatgtacttttatgccaggagtcaaactagtgtttctctagtttcggcaagcccagtttattggccactggcagatcaatcttcaaaaggcacaagccatgtcactcctccgcttgtaaaacatgcccattggcctctcattacctttttagaacttatgtctcagtccttaggattgtcatctctgtaagatgagaagcactgtagaaggctgtgaaaataaaatgaggtcatgtatttagaaaaactcaagaacttgatgaactatgaagtaagcatgtatgggaagaaataaagcaagtgcctgttaaagttctatgcggagggcttacattatttcctacaattacaaggcgatgctgtaaataatgtgatatgttaccagtttgttatggtgatgtgatggtgccagggctagaactcaggacttcacatgctcttggctagtgctttatcactgacttacatcctcagcctgtaaaagaagttttaatcttgactttacaaatgaggaaagtaagctctaaaagtttgaataattgtctagctccaagacagtaataattattttgcaggcgggcagtggtaccacacacctttaatcctagtactcaggaggcagaggcaggcagatctgtgggagttccaagacagccaagactacaagagaaaccctgtctcaaaaaaacaaaacaagaaatttccattcattcagaggacctagattcacttcccagcatccacagggtggctcacagccatctgtaatatgcagatccaggggatctgatgccttttgacttatgtggacatgaaacatacatgtggtatgtatagaatcatgtaggcaaaatctcatgtaaatgaaaaaaggggttgaaaaaaagtcaacataagcagggcagttggtggcgcacacctttaatcccagcactcaggaggcagaggcaggcggatctctgtgagttcgaggccagcctagtctccagagtgagtgccaggataggctccaaagctacacagagaaaccctgtctcgaaaaaccattaaaaaaaaaagtcaacataaatgcagaaatgttttcctagtacataaaacagaattcttggaaagcagagtgacagagatctcaactaggtgattaggggaaaatctaaggtgtttaaattgataactatatggcaagagtggctagctgtatgaagatcctgggagctctctagctttcgtgcacacctaagattagcccattctgatgggaggggtaaaggcacttgtaagtaaggaacttgatttttatactaggtgtagtaaagagggttttaagaaaaagagtgaaatgatctgttacagaatattatttcaggggctggagagatggctcaggggttaagaacactgactgttcttccagaggacctgcgttcaattcccagcacccacatgatagctcacaactgtctgtaactccagttgcaaggtatctgacatcttcatacccatgcacccatgcaaaataaagttaaatttaaaaaaatagaatataattttaagatgtgttatatttgtttatgctgtggaacatttgtttaatgatgaaaagatgtgttgcatttgtttaactctgtgaacctgttttacattgcctgtctaaaacacctgattgatctaataaagagctgaacggcaaagagccaggcaggagagggagaggaggggctgtcaagcagagagaataaaaaggagaaatctgagagaagatcagggagttagaaaaggaggaaaggacatcagagtccagcctacccagcgacacaaccagcaacagagtaagaaggaaagagactatatagaatagagaaagataaaagctcagaggcaaaaagatgggataatttatgaagagctagctagaaacaagccaagctaagactgggcatttataagaataagactatttatttgggaactgggtggcaggccccccaaaagagtaaaaaaaaaaaaaaaactacactgatctgatttacatttttaaaaatgtttctctttaatatcaaagatacatagatctatattctaagcttctgagaaagcaaaggactattgttatcaacttgggctatttttttccaaagataatcaatttatttttttaattatttttgtgtagcccgggcccacagaggccagagtatctgatcctcctggagctgaagttacagatggttaggagcctcctgagaatcaaactcaggtcctctgaagagtgtatgtgctcttaactactgagtcatgtctccagccccttcgacttgtacaaatatgtaattgtcaaatggtcctacatattaatgtaggactgactttttttttctttcttggttttggttttgattttttttcaagacaggttgctctgtgtagccctagctatcctggaactagctctgtagagcaggctagcctcaaatttagagatccacctgcctctgtctcccaagggctgggattgaaagtttgcacgaccaccacccagctagactgacttattttaagtcctttctcacacttgacagttatgtgtccaaagaagttttatctcactaagcttcatttctacatctgggaagtgaagaaaataatggtactcagagttggtggagactaaatgagaatgcacaaacaattaaccaagtgtctgccacagtaagcactcaaaactattaacatgatgacctttggtgctcatggcagtgcaggtgatgtaatccagggcatgctagacacttgctgtggcactgagctaaacttccatccctgattattccttttgttacttaatttctgtgtcttaatttctgttacttaatttctgtgaaatggggataacaacactagtttacaaattttggcagtgtggttgtctaaattacaggtttggggattgaaaagcaatctagtgtatacagcttttataatgccacaccccagcagcttctaggtcaatgatctttagtcaaatatatttatagttttgtggtctgtgacactactagacctagacatgtcttaaagatccatatatccccaatttaaagataatggctgtagaaacacactctttttcctggagattatacctacaaagatgttgactgaggactggaaagatggtgagtgaaggcatttgccaccaagcctaacctgagttcaatccctgagtatcatgtagtggaaatatagtaccaactcctacaagatctgaccctcactcatgtgccactcccacacctacacacctggtctacatagcaagttccaggccaggcattgctacatagtgaaaccctgtctcaaaaaaaaaaaaaaaagaaagaaaaaataaaaagaaaaagaaaaaaaagaaaattagctgtaacaactgtttactacatagaaaacctggaaatggtctgaatccatagtttcctatccatgtaattacctctaattttataatagagtaccaaaaatgtaaagtgaataaataggacctatggacaagttataagttacaaagaaaaattcaaaatattttaatactttactatagtgctttagataaatttctacaaaattatagttaaaattatcctttactcctctctcatccaatggtcctcccctgtactatgccaaacatagctgtcactgtgaagtttgagcttttataaatatatatgtatccagagtataattttgtaagtttttaatttttgttttttcttttttgaaacagggtttctcagtgtagccctggctgtctcagaactcactctgtagaccaggctggcctcgaactcagaaatctgactgcctctgcctcctgagcactgggattaaagatgtatgccaccacctccaggctataagttatttgtatgttatatgttacttgctcactactttttttttaaattggtgtgtgtgtctccccctctctgccctgctctccatgcatttaggtccaagagcaaccctggatatcagtccttgactatcatcttgtttgaaacaatgtttttttgctgctttatatgccaggctagctggtctaccaactttgggaattctcctttctcagcctctcttgccataggagtgccaggattacagatgtggtaccaagtcaggttttacatgggttcagagatctgaactcaaatcttcacactttgcatgtcagacaccttcccaagtgacctgtctcttcatccccctttcttccttcctttctttctttctttctttctttcttcctttcttcctttctttctttcttcctttatttatttttgagagagtcttacagtgtagcacaggctgtctttgaacttagaatccacagtggtctataaatttgctaaactaatattatatttccagtacatgaaaatccagaacagttaatatttaggctttcccaattttaattaatagccataaaagtacagtaactatagttagtgtgagtttttacatatatgggtattaacaagtgtagaattattttattacaagtgggttaaaagaattcaccccaggcttataacataatcattaccccaggaaggaagctgaatagagaagaaaatggaatgtgaaagaagtaatagaaattacttctattatctttttatctttaataaataagtttaaagctggcggtggtggtgcacgcctataatcccagcagttggaaggcagaggcaggcagatcttagtgagttcaaggctagcctggtctacaaatagagttccaggacagccaagactgttatacagagaaaccttgtctcgataaaaccaaaaataaatagatagataggtaggtaggtaggtaggtaggtaggtaggtagatagatagatagatagatagatagatagatagatagatagatagatttagatactatcttttgtctaaatttatgtttttggttgtgagcctagcctttaacagctgagccatctctccagccccttttgtctaaatttgaggtgaagtagcattagatagcctagtctgagcaggcatttaattgcatacagttatgaggaagaggcaggcaggtatctgagtttgaggccaacctggtctacagagcaagttccaggacagctaggcagaactacacaaagaaaccctgtctcggggctggagagatggctcagaggttaagagcattggctgctgttctagaggtcctgagttcaattcccagcaaccacatggtggttcacaaccatctataatgagatctggtgccctcttctggcctgcaggtgtacatggaggcagaatattgtatacataaaagaaagaaagaaagaaagaaagaaagaaagaaagaaagaaagaaagaaaagaaaccctgtctcaaaaacaacaataataataaaaaatagcccaggctgacctcaaactggtggccatcctgtcccagccttttgaagttttaggcataaccattcctggcttaatcactgaagtcattaacaactttacctttttataaactaagaaaagggaactgggccagcaagatgacccagctgtttagtcccaagaacccacatgaaagtagagaactcaccttacaaagttgtcttctgacatccaacacactctgtagcacatatgcctctcacctgcacacacacaataaatttaatttttaagtatttattactaaaatgtaaagcatgcactttgcctgctgagccctttcaccagacaaaattttaaggttgttttggtttttaggtatgtatgtgtgtgcatgcacacatgctcatgtgagtatatgtgtgtgagtgcaggtgcctgcagaggccagaagagggtgtgagatcccctgtagctgcagttaacaggtgtcttatggagagcttgggaaccaaactaaggtcctcttcaagagtagtaaacacacttaaccactgagccatctctcaagccccatcagtagacacatttaacttttttatttaattaaaaagtagtatttacgttccaaagagacaacttgctgcttaaaagcacttattgcaaacctttcattgtgtgagaaaaaaaaaagcacttgtagaagacctgggtttggtgcccagcacccacatggcagctcacactgctgtggaataatcctctgtacactgtgtgaatatatgtcactatgattggtttcataaacaagctgactggccaatagctgaacatgcacagttactgaccatcaatttaaaaaatgatttatttgggggctggagagatggctcagaggttaagagcactgtctgctcttccagaggtcttgagttcaattcccagcaaccacatggtggctcacaaccatctacaatgagatttggtgccctcttctggcatgtaggaatacatgccagaacactgtatacataataaaatctttaaaacaaaaaaacaaacaaacaaaaaacccaaagatgtattatatttgtttatgctgtggaacatttttatgatgcatagatgtgttccgttcttttatgttacatttgtttaactctgtgaagttgtgacactttgcctgtctaaaacatctgattagtctaatatagagttgagggctggagagatggttcagccgttaaaggctaggctcacaaccaaaaatatagagctgaacagccaatagcaaggcaggagaaaagataggcgggccttgcaggcagagaaaataagtagaggagaaaactggggagaggaaactagaagagaagaggaggactccaggggccagccacccaactacacagccagtcacggagagtaagagtgaaagtaacgttaaagaagtaagaggaagataaaggcccagaggcataagataagtgggataatttaagaaaagttggctagaaacaagtcaagctaaggtcgggtattcataagtaagaaaaagcctccatgtatttatttgggaactgggtagtaggtccttcaaagagcctaagaataaaaacatcaacaacacatacatgtaggtaaaacactcatacactgtcttagggtttctattgctttgatgaaatactatgaccaaagcaagctggggaggaaagggtttatttggtttacacttccatatcatagtccatcattgaaagaagcaggacaggaactcaaagagggcaggaatctgtgcaatctcccttgtgggtcaggaggggtgggagcttggctctgggccatgagggcattggccttttacacaagttctcaggagacctggtcctgtgacaggcatggatggatgtgagggcagccactgggtttcccctagtggttttccctgctaggtggggtattttatcacaccctcctggatacccagggtagggactgtgcagggagggacacagggatggctcctgggataagacacaaccctgtctttgattctcctggtgagttagtttgctctcctgacttgacaccagctcccctcagtcccaggagccagggccacctcttgaggtttttgggaccaatgggctttgtgctgcaagaccgctcagtaccagaaagctgctcccttacaaggccctcaccttggcaggcttgaccacttgacaagttaccaggagattgtgctttgggatctgtgattgggaggtgaggttacaactaaggtgcttgtgcttattgagaggtatagatgctcctctgcttggccacccagggctaaggtacaggggccagggccagaccagacccaacacctccaacctttgccatcagatattagggggactgcagcaagtcagggcctgctgacctggagacaggcctttagataggactcaaaaggttccatcccacctcctccaatcctgcaacctctttccttttaagaggcagctagaatgcagttggaaggagagggaagaaggtcagggctaggaaggaaacagtgaaatgatggaacgatattaacagaggagagtaataaaataaaaaagcccctgtgctcacatgtgaaatgcaaacactcaagaacatgctccctgagagctacagaatagaaaagaatggcaagagaaagttccacaaaccactcccagtgtaggccttaccctacctcacctcccagtagtggtctcagccaagaggaacctggaacaatcgagctggagaaaggagagctggttggatccacaggagcccagggcttctgggattggaccgcccttggaaagatttatttttattttttattcatgtgtatgtattcatgtggcagtatgtacatgagagcaaagtttcccacgaaggacagaagagggtgatggaccacctagagctggagtaacagctggctatgagctacctgataagggttctgggaaccaaattctcattctttgaaagagcagtaaaccttttttcactccagtccctaaactgctaagttttatgttatggtttctttctgtctatctttgtttttgagacagggtcttattgcacctcaggctggcctaggcctcactgtgctgcccggtctagcctcgactatctgattctcctgcctcagcatttagggtgttggaattacaggtatgaaccaccaggcttcttgtgtcctgcttcacttaccatggttttgaacttaccttgccttttctcatgtgtatagcatatccgtatgccctttgctttccttcttggagcagtgcctctgacaacaaagctcagtctgagtatctagctcattagtttagttaattttagtgaatctagaccacaaggccacaagatggcactctttagatggaaaaaaaaaatctattccaatgtcattcagccttggataataccagagcaacagaaaaaaatagtctgtgactacttctggtactttacctgtgacaatatttttctgagaaagaaatttagaaagggtttccatctgtgaaattcattaattatccactgataattgcaaaacttgtgctagcgtttctgtttggaggttgtgtttcttaatgccttagataccaatttgtttttattaaaaatatgactagtggggctggagagatagctcagagttaagagcaccgactgctcttccagaggtcctgagttcaattcccagcaaccacatggtggctcacaaccatccattatgagatctggtgccctcttctggtgtgcagatatacatggaagcagaatgttgtatacataataaataaataaatcttaaaaaaaaaaacacccatacacataatgttttaaaaaaatctgactagtataattaataccaaaattaaattagggaataaatatttttcagtactgacgggagactggaaagccttgggcacacaaagcaagtcctctgctattgacaatgtccccatgacctgaaggaataaatgctttaacacaataaagccaaaaccactttcgttattagtgtgtggtggggaggggaaggacacgcgtcactgtgactgaatggaggtcacaagttaacttggtggagtcagtcttcttcttctacctttacatgggcctcagcagccccttgtcaataaactcttaaaataaaaaaaaaattaaaaaaagattacttatattatgcgtgaaagtgagtgaatataaactcccaaagctacaaaataactttgcttaaaatacaagtcaccatcacatactcagtgagctcaaggccagccttgggtacatgaagccctatttctagacggttcagcaagtgaagggacttgctgccaagccagatcatcagagttcagtccttcaagccttgagacccacacactgggaggaagaatagatttctgaaacttgttttctggcctccacaagtgtgctgtagcatttgagcacatgcacagcgaataaataaataaaagatgaaaaactctctttcattttataaactttacataaaaaacttgtaaattaaaaaaaaatcacagcagggcagtggtgacacacacctttaatcccagcactcaggaggcagaggcaggcagatctctgtgagtttgaggccagcctggcctccagagtgagtgtcaggataggctccaaagccacacagagaaaccctctctcgaaaaaccaaaaaaagaaaaaaaaaagtcaccttcaagatgactcagtaggtaaaggcactcaccacagaacccgaaaactgacttggatccctgggacccacaaagtagagggtttttctctgacctggaaaacacacacacacacacacacacacacacacacacacacacacactaataaagtttattgctgcattggaatgagtaagaattctagaaaacacacttaattgcaggagaggcagctgacagccagcaagttattaccatgtgggaagacaggtccggtgtcagcagatctgcttttgtttcaagaaaaccagaactttggggttctatatgaaattatttcatcttaaaatgctgacagctaatccaaattggaggaaagagggaaggaagaggagaagaaaacggggtaggagagaaaggaacaaggaatgagagagacagagagaggggggagggagggagagtgcccggtgatgtccaagctggacaatgcacacttcagcagctgcctgttggtggctcctgctttatacacatttttttcagtttcttttcccaacaattcaaattgcatttaagaacttaattcaagttggtcatggtggagcatctgtatacccagaacttggaattctgaggcatcacaatctggagaaaatgacagtctcaagcacacacacacacacacacacacacacacacacacacacacagagatggggggccttaataaaggcttatttagaaataaatgacaaaagcagaatttccatcgattcataattctttacgtttggacagttttttattaaaaatgaaaaaaataaatttaattatacaggagagaagggcccaaacaactgagatacgtgtctacattttatctgagttttaaaagggtgatcaaatgtaaaggcttggggacttttgtttgtatttgaagatctagagagccctgaacttctaaaattcacttctgattttaggtagttaatgaactctcaggccgacatgctcaaaattcagttaaaaagtatcaatgctaaaggaagagcaattgtcctgataatccattcttgggtttattttttaacctataaggcttcaaaccacctagaaagtgtgatgctgtcacactcagagttcatagcattccagaaattgggtagggagaaaaactagtcctcttttcagttgaacagccaagaagacgtttgaacagttcaacctgactcaggctcttactcagatacattttaataataatgcgttaatatacactgtctcccacttataggagagattggcatcttttaagtcacttcattctcctattctcagcgtttctccctagtctacagtttttgcaaacttaatataagcctatccgcttccactatttcctctgctcttaaatcagaattgagatgcttcggagaccttcacccctctgctgtctcagattctccccaccctgacccctgccccattttggaattcggactcctgcctactccatcccggttcccaagctctaagacgcccagagcctcccgccccggctgcactgcacctgcccctagtgcccccgccaggcccacaacctcagccattccagaaattgacaaagaagttgcagagggagtgccacttctcggcgcagtaggtctcagtgagctccgcattctggtccagaccgtctggctggagcccggccaccgcggaaggcttcgggaccgggtcggagcccgtcttcttcctgcccgcgctggtcttcgccctcgagggcttctcttcgggcagcgagctcgaggaccacatcggctgcagcagtcgggaccggctccgtgccctgggaaggagctgctcggcgggactcacggacagggtggggcgagcgggccggtgcagctcggcgaccgccttcttgtgggcgcacaggcgcggtggcagcggcgcggggtccaggcaaggtcgctgtctcctgcgcagcgctcccagcagccgcctccagtagtgcgagcgccggaccccggaggtcgcgcagcgctcgggatgcccgcggtaggcgcagtgcaggctagccccactcggagtctggcagcgcagcgccagctcgccgcccgcctgcgtccccggggcgggcaccaggagctgccagctgcacgcgtgctgctctgggctcacgaagcgacccgaggaaccgcccgtgggacccgaggccggggccgccttcctaccagtcgaccccttgtccttgccggcggccacgaggaggcagcatcccagcagcagaagcagcaatctcagcgtcgaaggcgacgcctgcggcctcggaggtctcctgtccgctctagccatcccactcttttggggtccctggggcttcagtgcaggcagcacgcagcgaggagcatcctcggatctgcggatgaaggctacggatgagtcccacgcagccctttccctgggcacaggaacctgccaactcccctgacccgactttctggaaaccaatgttctcagctgcgaggagcccctctaaagatttgtcctagggggacaacttactgtttaagaggtcgtttttgaaatgttcattgagataggaaaatgacgtttaatcatcaccctgccaccctccaccaaattgtctacaaaatcatttcaggttaatcgtaggacgcatgcactttttagcttaccgaattctagaagaggtgaagaggccctattagagtagagcgaatgactgcttaagggcttagtctgtttcaaacggttctctgtgaatgaacctgttatcaatgggagcgaaggggcctccccctctatgcccctcccagacttctctcgcactcgattttccacactaccaacacagaagacacaccctcgtgcagacccacacaccccagaagtatgatagaggcagctgtgtgacatgaaatataaatgttgtattttgcttccatcgctgaaaataaggtaaatgttaacaaatcttttcttttgaaacttttacaaatttatctgatgaataaaagtgaaacaggaagacctaagttttaatataaaaaagataaaataaaatagatattatttgactatttgcacagcttcctttttcttttcgcattacatgtatttagtgtgtgtgtgtgagagagagagagagaaaaacctgcaggagccagtatctcttttctccctctattttgtgggtctcccctgtggcagtcaggggacaatgaatcagggaactaactcaggactgtcagagttagttctcaccttccacctgtgggtcctggggattaagttcaggctgtcagccttgacaggaagctcctacaccaacagaggcatcttgctaaaaccctaaccttgtttttaaagcttagtttaaaacagggtcatgctctacaaccacacgaaccctgcaatcctcctgactcagttcccaaatagctggaattaaaggcatgccccaccatgcccagttgtcttttattaacttacagcatcagcctgagccagacgccaatgcaaggctcaccccaggtacaatacatttctgttgaccttctagcattacttgctccttttaaaaaatattagtgattgcagcaaattcccgacttttccttttttgatctgtttctggggaatagaaactactttattcccgttttgtataatttttttgtactcacacaattgtcaaggcatccagatggaacatggtttgtgggtaggcttatatggtcacgtgttgagtaacactgtcttttgataaaattcatcgtagtcaaggaaagaaaactcaaagtatctggagaccattctccaaaagtatgaatcaacatacgaattatctaaaaatacaaacaaaaagcatgcattcccagaaagaagtaatggaaatgaattcatagctagaatcacactttcagccctccctgaaagaggactgacaagccctctgatggtctgacaaatttctttctaagaaagaggaaaagggcactctgtgtgtccaagcaagcagccagccagcatccctgctccttactctctgagaggagctttgccaggactcctcctccagaacaaagtagagggacaggacccagctgcttgcagtgagcagcaagggatcaaatccttccatcttttgaattacattagctaagtcccaatatctccagggttgtatgtagattgggttaggttaagtcggggactttaaggcacactcatcaccttgtagaattatacatgtagtctccacagaaacaatagcatgaatatcaacaagtataacatgtggggtacatgatgtaacccagagaaagatggtagacttcaaagagctggagaaaagcgactgaaatgtgcaggagaagagagaaaacctctgtgtctaggacatctagaaaaaggtttggaagaacatactaggaagacacacctgcagttgggagagaactgaatcaaaatctctctaatacaaagatgatggttctgggaaacacgaatgttttcctgtagaggcaccatccagagcagagggagagctgccagggtggaccagtgtttactgtcagtgcttagattagaaggtattggagaggaaggtgctggtagctcagtctatggggagaaagagaagtcatagacataaaaccatttggatctattctcaaaattatttggcactcaggaggcagaggcagggagagctctatgagttcaaggctagtgtggtttatatagttagttccaggccattctacgtggtaactctgactcaaaaaaaaaaaaaagttacctgccctaagttactggtccaatttataaatttgcttggcagacatgggaaacagaaaatggctagtcacagtatcttagtacgctgacagtctgccctacatttttaaacccagaatacaaatttgtacaagaatattagcatattcataaaatgctaactttctatcatatctcattgcctaagcatcactatcacctggaagatgtgttttaatcatttacattctgttgactgaaagaaaattctggggataaacttcccattttgatattcagcacaaagttcaaggctaaacagagtttctgaaaaggtcaccatagaagggcagtcagccagctgcaaagaaaataaacaatggaagctcttgggggggggggggtggatcagcgtcattgcccttccaagctgtcagaagctgcccacattccttggcccacagccttcttccatatttaaacctggctatcatctcattcactgattccatctttatattttttcagaatttcattttcttacttgcctctctcttttacaaaacagacaacaacaaagacaaaataaaataacaacaccaccaccctaggcatggtggtacacatgtttagtcctggcacttgggaggcaaaggtaggcagatctctatgtgttcaaggtcagcctggtctaggaatgagctccaagctcaacaagtctacatagtgagaccctgtctcaagaaaataagcaaagaaataaataataatacttttatagttacattggggccaggcattggtggcgcacacctttaatcccaggactcgggaggcagaggcaggtggatctctgtgagttgaagaccaggttggtctacaagagctagttccaggacagcctccaaagccacagagaaatcctgtctaggaaaaaaaaaaaatatatatatatatacatatatatatatatatatatatatcagaatcatccgaggtcagctgtttaataaccttaattccacctataagcttaattcccccatttcagtctaacttacaagttctggacattgagatgatgacctctttggagggtcattattctgactatcacaaatgatattataatccaacgagctctaaaacaaagaaatgggacaaaggaaagcactatatgatgctgagttaattcatgccaggcagtggtggtgcatatctttaatcccagcactcaggaggcagaggcaggcagatctctgagtttggggccagcctggtctatggagcaagttccaagccaaagctatacagaaaaaccctgtcttgaaaaccaggtgggggggaggtatcagttcagaaaatactaatcctaaatgtatacaacaacagctacaaagtacaaaaagcaaacaccaagagaagagaggccagccagatggctgagtggataaaggaacttgtctccaagcctgaagatctgagttcaattcctgggacccatatggtgctggggggaaactaacttcctcagcttgttctctgggactaaaggtttgtactcaactacttcagaagttgatttctaatcccagaactcaggaggcagaggaggcagatctctgagtgttcaaggccagcctggtctatggagtgagttctaggacagtcagagctacacagtgagaccatgtctcaagaaaagaaatcaacttctgggctgtggtagggcctattttattttgaacaggtcttgttttaatgatagaaaacctatttgtttgtatgaggtgggtgggaaaggaagcaacgggaccaggagaatatgcctctggtttctccattgttcattttgataaagtaccggttattcacccaaatctgctctccctttttcctggattcgttccctcaagttaggggcatttttagccttccttgtacacagttgttatcaagtgactaaccttttggcagtgatttgggcagcttcaacttcactatgctgcttgtcttcgactttccttttcctcacaatttagtcaagcatgcagtagaaattgagccttaaccatgaggggacgtgcagtaccctaaggacaggagagaaggaaaattgagtatgaagagcctcagaattgcagccctgcgaaaaccttgtccatgccttgtggagtcacagcacagacattgctcattgtaggatgcgcattggacaggaatggcccatccaagctcctctgcagggacagtcacttgtggtgacccaagcgaaatatgttgttatgggaactggggtgtcttctgaagatgccattggtgagatgtagctggctaacacggttcccaattacccagccaccacatgcacaattaaagaagctagtttctatagctgtcatacaaagaaatttaagaaagaccacttcagaatcactgagacaagattttggcattttctcctcccacagctataaaatcttacaggaaaatctaagtagcaatgtttgcaatagaagcccacaaacgtgggttcagcctggggtcttgcagctgtttaagtaaccttgagcaattcacttcccttctttgagcctcagttttcccgtttgtaaatagggatggtcatacagcactttcaccacagggccctgcagaggcttaaaaggaatgctcaacatagagcacagagcctgactggttgcaagtgtggagtcaatatattattaaagcctatttttttttgtataccaatatgaacatcaaaagggggaatctctgtctgaaaatgtaattatacaacataatcatcagcaactctccatctcagtttgtgacggtatgtgtctgacgctggcaaaggcgcctggccttcactctccagtaccaggaacccaaaagaaaagaaaaagaggggtggggagaagatgagagaggggttgctgcagagtgaatttcttggtgataagaactggatatgtaaaataagattgtctccaatttaaataaaatttattttaaaaaatcataatgtaagaaacaaacataaaaagagggggtggggacaagaggagagagaggttgctgcagagtgaatttcttggtgataagagctggcctgcactcacaccccacacagaagcaagggggtggaagcagtttgggaactcttcaacatggaggacttgaaaggtgggaagagtggccttagagcccaggggaccacagctgacctcccagctccacagctttcttgtaacttcaaagaatggtttctttagttcttgaccagtgcttacagctgcaaggctttgatgaacttactctgagttctgtcccccctgtgacctctggctcatcacattcaaaaatctctccttttcaaaatataaaagcagctataaaggcatcccaaacccctcctctccatagaagaagaagaagaagaagaagaagaagaagaagaagaagaagaagaagaagaagaagaagaagaagaagaagcagcccacttcagtcatattaaaaccattgttgcttaaggtatagcttagaggcatagcaagtgcctttcatgcacaatactctgggtttcatccccagccctgtagaggggaaagaaaggtagaaagaaagaaagaaagaaagaaagaaagaaagaaagaaagaaagaaagagagagagagagaaagagaaaggagggagagagagagggaaggaggaaggaagggaaataaaaaggtggccatcatatagagacagcaagaaactaagaaacacaacagaaatagctgttaataatagcaacacaaggtaaaaggagagtgaacttaacaggaaatataggaaggttatatgaaaaatgcagaactactttggggatagaaaataaagactcaaatgaaaacatatggattatcattattacataagatacattaacatttgaaaatgtctctctgccaggcgttagtggcacgcctttaatcccagcactcaggaggcagaggcagaggatctctgtgagttcgagaccagcctggtatacaagagctagttccaggacagcttccaaagccacagagaaaccctgtctcgaaaaaccaaaataaataaaataaaaatgtctctctaggttaatgtatacacttaaacgtgattacaattaaacaccagtaggatttttgggtctgattagttaggcgagctgattcttaggttccagcgggaaaccaaaaagaagtaagtgagcgggagggatggaaggttctgtgtttcacagaggagagagaaagatgctttcaccgaggggtgcagcttcaagtggctggcaacacagcctcaaacaatgcgaggctctggtgggggtgttgtttctaggtaaccacggggactcctttaaaaagaccagaaactccgaatcagaccagtgcttcagctgacagtggccgcctttgagcagggtggtcatgtgacggtggtgtggctgaagaccctcgggctttgatccatgtcttcttttgttgtcagtcacaatgatcacaatgaggatgattcttctctaagtcaaaacaggggtaggtcccttgcttatcgattgtaagttgtgggaagggaggcaaagagaaaactgctcgagtgggatcccagaagggtgagacatcaaaattagtgcttggcatgtgccctggaagtgttcctaggcagtgccacagggtgaaataacaaacacacagcagaggtacctatttcctttcctctcctctaatgcaatctcttcctatgacctcttcctattgagagctctgaatgctctcaatcaaaaacagggacgggagggggaacaaaacaatatggaggactggagcatcctgaaaactggctggcagccacagtatctagacagaagaggatgcttagggtcaccttctctttaatcctacaactcattagtgctcaactttcctaactcttcgtccctttactgtggtgaccctccaaccacatacttatttcattgctacttctgagctgtgattttgctgctgttatgaatcttaaagaaaatatctgatatgcaggttatctgatatgctgcccctaacggggttgagaccacaggctgagaaccactggtctggtttgtgtaaccaaggtcagtatgtggatatacaaccagactcttagatagtctggttttttgagacaggatttttctgtataacagctttggggctgtgctggaacttcctctgtagaccaaactggcctcacagagatcaacctacctctgcctcctaaattctgggattatgggcttgtcttagaggaatcttaatgttcctggaaagctctgtaaagatctacaacacatgtgtaggcaagatggctgagagggtaaaagtggtcacatacacacaggcaggcaaaatacacataaaataaaatgaataaatctttttttcctcaggatttatttattatgcatacagtattctgcctacatgccagaagagttcaccagatctcattatggatggttgtgagccaccatgtggttgctgggaattgaactctggacttctggaagagcagccagtgctcttaacctctgagccatctctccagcccccaaataaatcattttttaaaattgatggtcattgtgcatgtctatgggggtacatttttgtacatgtacataatgtataatgatgaaattattgttattggtgttatgatcttgtttaagtgtaaaaatataaaaagggcaagatgagacatgagaacgagagatacattaatcatagtttattataggtgggggagagcgggagtgggagacagatgtgagagagggagagagagagagagagagagagagagagactcagaagaggaagaggaagaggaagagagagagaacagagagcagggaggaggcaagagagagtaaagagaaaagaatgtaggtgggcaggagtctgtttttaaagaggtcctttacacctgcatgcagacttagttcccatagaaccctgggctgaccagggtgctgcctgagtggattctgccaggtaacagggccaggccagcgtaatgcctgaacctttcaattggtatatgtacttccttggacatttattacttctttgtgttggggatattaaaaatcctctccatgagctgtgctttaaatatatagtgttgctatcagcaatagttagcctactgtattgataagtgttggaaattagtccttttacccagctgccattaccatgggcttgccatctgcccatcccccatgcccttctcaggcttaccaaatccccccccatatatgttttgataggtttcactatgtagctctggctggttgggaactcattatataggccaggttctatctacttttcacatctattgcatggtcttacagcttttgcatgtaaatgaaaacacagtagtgttttccctgtctgtctttcacttccacactgccctctgcttctgtccatctgtctattcctttattttttatttgctgaataaagttatagtgtggtcattttacattttctttatgaacacctaggctgtcggattctgtatcttgtctaacataaatatagttgcagttttgtgaggattggttttgttttgtttttttgagatggtatctgtgacatgcagggctttttccagagcaagctcaggtagagttctttctatctggccttcagtgcaaagcctctcctcttaggagcttagcacaccctcttgggattcaaggaggaccaaccttgtgccttgtgttttctgcttagtactgcactcttttcacaggagttagttaaccattgtagagggttagataggctggaagccacccctatttaacataaagatggctgtgttctccccacattcctggaaagaaaatccccaagggtccctactgtgatccacaacttgcacaaaacggaccctcaaaattcttattcctgcccaactgccgcatgttcctgtctcaacacttttattggtagaaaaagccaatcatctgtttgtttggttgctttccaggttacaaatctttatatatatatatatataatatatatattatatatgtgtgtgtgtgtgtgtgtgtgtgtgtgtgtgtgtgtgtgtgtgtatccataataccataatatatatgtatataataaatatgatatgtgtatatatgtgtgtgtatgtatatatgaatgtatgtatgtatgtatgtatgtttgagagagtgtcacacagcccaggatggcatcaaactcactgtgtagttgaggctggcttttaactcctatttgtcctaattccacctcctgggaggttgggatcacaggcgtgtgccactgtgcctggcttgagatggatttcatgggtgaggaatcaggttcagtcattcaatgatttccccagacagggacactggcacttgaaccaaagtcgtcttaaggttgcagagctaacccatcaggaggccagaatgaccaccctttagcacacatcagtaggttatccttggggcaacctgtttcacttcccctaagcgactttactctgtcttttaaaggcttcgggatgggaccctttcccagtgatcttgctagcatcacaaccctcctgcctctgactctccaaagagtggggtcaccagacagcaattttaggtgcttggttgggccagtttttccagtgagagaagcccagctccacggcttccagaaagggtttcctaaattatttgaattgaggggagaattcgtggttctaggaacggaattaaggtcatcaaaaagtgaggttctggaaatatattccaacagagccctgagcaccagccagggaaagggaacaggcaaagaagctgcagctcgcgccaggtggtctggggagcccccccccacccgcccctaaaccctccccggcgcgcactgggttaacctcgggcgaggggcctctgcccgcccacattccgtcgctcaaaggggcgggtggtctgatgctggtggggtgatttcgtctctccatgtcctaccctcccactggccgagcccgcgcccctccctggtctccccggcgccgcgcggtcacgttaccttcaccgccattcaggcgaccctgtgggcttacaaagcccggacattaagaagtctgcgggcgtcgctgcaattagaaacgtgaggcccggatcggggacagctaccgtggcactttaggccaggtcaccccatcttgcattctgaccgcttccgtagtcgtttgcgaaggtttctttgtctgcgttttggaaataaagcgtgacacagctgcaaaagattgttgcctggtctttcatcaggtccgtgttaatgggggaaaacaaggattcgccgttgtttaattttacaaagtatgtcttgggaaatgtaaacgtatatgagaaaatcaggttttaagctgtggccacctaaatgaaaacaataatacagtatctgtgacaaacccaccctaggatcgtctattgataagcgagagctggcaacattccccaagatatctgataaaacaaaatgctgtaaacgcttccctttttgtttcctttttagtgccgtggaggtgacccgtcagaaggccatagactgacgatcctttagcatccaatcacaacaaagaaagtgcgattaagtccatttatttaaccagagaaaataaattagcgtgcaggcatgaacagaaggaaacgtccaaacacaagataaatcgatcacttcgattagtagtacttagggagtctatgatgacttaagggtgactagggtcatggtcctgccctcctagtacccctgaggaaaagtgcataaccaaagggccaataatatcaaaggatgaactccaggtgttgtagttgccctgggcagagatgcctcaaacagtcaaggtcttgggtgtgtggaaaccggtggaaggaaaattaccctgcaaaaagtacccctgcaagagttccttacaaaagcatgtaagggctggagagatggctcaatgggtaagttccaagccagtcagagctatgggaatgaaccttgtctcaaaaaaaagggagtggggtgggggcagtaacaaaggcaaagaaaaagaacctgggaagatgcctgagcaggacaagcgcttgctatgcaagctcccggacttaaattcagaccacccgcacccataaaaaggccttaaaagctctgaaaaatggacaaggcagcttgggtttgcaacttcagtgctacctggtggagacgatggatttctggccacccactctagccaatctgtgggctccagattcaatgaagagacttatctcaaaaaataaagtggataaccgggtggtggtgacacccacctttaatcccagcacttgggaggctgaggtgggcagatctctgtgagttcgaggccagcctggtcttcaaagagagtttcaggacagtctccaaacctacagagaaaacctgtctcgaaaaacaaacaaacaaaaaaaaataaatacataaaaaattaaagtggagagagagggcaggacgcttctggcccccacatgcatacatgcatgcacccactcatatgaacacacacacacacacacacacacacacacacacacacacacacctgatacaggagacttgcaaatgcctaataggacaggtgctagtactccatgaggacttagccagtaatcacagcatttgtgaggctccaatttgtgaccttcttgaaataccttctttcctctttgtcatggcccagagatagcagtgcacataaccagctgacccccaatcgcatcttagaaacagatgtgacctcgagaagttcttccattccttggcctgtgattgaatgagaatcttggggtttagctaagatgctttctatccagatgagagaaaaaattaaaaagagccacaatggaatatgtttagaaaattccccttcagagctggggttgggggtgtgtggcttgatggtagagtacttgtttggcctgcactgtgttcttccaacatccccaaaacttcgttctctttttgattgagttaacattatgctaatgtagagtagataggtgttgaagatgtattgtccagaggaaaacacaagatgccttgcatattatttaaaagaagagaaaaaagaagcttgtagtgatatattatctatgatttaataaagtttgcctgaggattcagaaagcaaagtcaccacaagctacagaggtcactcagaggtggcacacacctttaatttaggagacaaaggcagatggatctctctgagttcaaggccacgcaggcttactcaagattggatcagtctaaaagagtaacagagctcttgcctttaatcccagaactcaagagaggtatttaagacaggaacagattcagtatgaagcatttattctctgctacagggaagatagacatttgttctccggccatgctgaagagaggcagcagtttgagacttggtgaagagctcatgcgtggatcagccatttcagcctgagctagaggtgagagctagtgaccagctgctttgcttttctgatcttcagcttggaacttgaaccccaatatcaatctctgggtcttttatctttttatcatgttacagaagttcatatgtattggattataaatagatactctggattcgatccctagaaacacacacatatgcacattgtgcacatgtacagtatgtgtgcacacacgagcacacacacacacacacacacacacacaggcacacacacaggcacacatacacacacatgcacacatacacgcacatacacacacacgcacacacacacacacacacacacacacacacacacacacacacaggcacatacacgtatttaatttggtacaggaaaactagaagaatggggagtagggataggaaaagacctggtggaatacctttctgtactttaatatttttgagctgtatgaatgtaatatatatttaaaaattaactggagttaaacaaacatgaaattcatactttggcattctcctttatatcaaaccttgccattatgattttgcttcagcatcttttttctttctttcttttttttttttttttttttggtttttcaagacagggtttctctgtggctttggaagctgtcctggaactagctctgtagaccaggctggtttcgaactcacagagatcctcctgcctctgcctcccgagtgctgggattaaaggtgtgtgccaccctaccaccgcagggctaacacagcccccagccctcctttcatcctttcaaatgagagcagaaaacccggttcagcagtgtcttccctctgaagtcccagtctctcggtcttccctgggacccaatcccccctgaacactgctgtaactaccggagcactgatttataacacaacttcatgcttagaattacaggactgaagaagcatggatctaaggtctgttctgagttactctataaagtagtggctctcaggctgagacttcctgagtcactccactttacaaagtttgtttgctccactttgaggacaaacgctgaagtagaatcatcccacatcttgtttgtgtaagtaatcggccacatgtccatggcaaggcaggagacacagacttgtgcaaatcagatgttactacttgtaatggttaaccaggtggtagtggcacacgccttaaatcccagcactcagaaggcagagacaggcgaatctctgtgagttcgaggtaccctggtctacaaagtgagttccaggaccgccagtactgttatacagagaaactgtgtttcaaaatacaaaacaaagcaaaacaatcaagcaaacacatttgtaatggttggtgtcaattgtcagtctgccagagtccctccaggggagatgggtctctgggtttgtctatgagggattagccatcttgattgtgatggcaccattccctgtatgggaatggtgtagagagaaatccggctgagcactagagtgcattcactcatgtactgatctttgctttctgattgtggatacgatacgaccagctgcttcaagcttctgccatattgacttctgtgccatgatggactgtagtctagaactgtgagataaaataaaccctttctctcttaagttgctattttaacacagcaacaacaaaaagaaaccaagatataacctataaacatgaaatgatcagggctggagagatggctcagcagttaagagcactggctacttttccagaggacccaggttcaattcccagcacccacacggcagctcacaatggtctgtaactccagttccaggggaatccgggacccttccacaaacatacatgcaggcagaacaccaatgcacaaaccagtgagtaatgtgatgccctcactagtgtcatatgaaaggcacacaggatgaaaaaataggtgatgaactctgctcatggaatttcagcttggcccagttgctctgatgtctgtaacccactcaaactgtcacttgtctggactcggttctttgctttgaacgaactccatgttgagacagcttggtacttttggggacaggcctgtgactgcattcattatcccatgtacctcctatgacttgcctgtgtcaggtgtctgcctctgacctcactgtagcctctctgatctgttcctaccatgcagtattcattcgaatgcccatgcaagtgtgtataaagcaatgtgaaatgtaacttgtggtctgatagttaatattagtaattaagattagaggaaagggggcgggcaggagggttcaatgggtaaaggtgcttgctatttgtgtggcatatgacacctacataaacaaatatagtatattaaaaaaaaaaagattagagctgggcagtggtggcacaggcctttagtcccagcacagaggcagaggatctctttgagtttgagaccagcctggtctacagagcaagttccaggacagccagggctactgtcttgaaaccctgcttgaaaaaaatatattagaataaaagaaactgattgccaacacacaagtctatgaagggcaatcaggggtacggagattgatttttctttttaggctgccaactcacacacacacacacacacacacacacacacacaaatgacatggggacattagttatgaaagcttggccttagcctaggcttgtttctaactagccttataacttaattaaccccaaaatttaaatctacgttcttccacacatttgtaacatcattttcattatgcccatcctggttattctgtgtctcactggctactactccttcttcccagagctctctgtccccagaagtcccacctaacttttccctgactagctaatgtaatggcctttaagctctttaataaaccagccacagtgacacatcttcacctagtgtaaaggaatattccacaacagtggtatattacagccattgagatagatgtagctgtgaatttacatacatctgtatgtatgttaagcaccccagagtccttgaggagataaggaactgccttcctcagggatctgtcccaagctagccaagcctgcccctaaccttaagatcctggctgctcatcaagtgttcatctgcctcctttacttccaaatgtgatacaaaccagtagcaagagtcttcagttcccctagacacagtagataatctaactggactgtcattcaggccttgaatcagtgagcttcaagtgcatcattgtgtttatttaatatgaatgtccctagcacaagccacatgttgggaagagtcatatacaagagtgacatgtcttcttgtctacatggagcaagcagccttgtttgaaggtagcttcacaaggtattgcttgtgagaaacttgagtttggatgctaactagaatttccaaaatccatacttaacagataatcagaattattaacagggttaagttaccatatatatatgtggggggggtgtgctaaaggaggccgcagctccctccacccctaggggaggaattataggtactgatttgattctaatggcagccagccttgagaactcctttctacagtggatatcaggcaacttcctattggacaagacacagaaattattgattcctgggtcatagtttgctattaaattagaaaaattaaattcatttctgaatccagattaggtacatagttcaagtatattgaaacagatttcataccagaaacaatctaaccctgaaagtaaatatcaagtgtatacttaaaaaacaaaatccagctgggcagtggtggcacatgcctttagtcccagcactggggaggcagagccagacagatctctgtgatttggggccaacctggtctataaaacaagttctaggacagccagggctgttacacagagaaaccctgtctcgaaactcccttccccaaataaataaactttaaaaaaatttaaaaaataaataaaaatacagtagtagcagtaatacaatgacatgcaattaagtttttggagcttatgcttgcaaagggtggtctaccttacagacactgccctggaaaatctgggaggcattttaccatttgaccaacaaatacattgggttctggcttcactttcttttttagaggttccttgaaattttggatacacacacacatggccatcattatttgctgtgccctggagtgttacttttatttcatggggcttaagtgtgttgatgggattcttctgttcatggtcccacctcacaaggcaaaacgatagtaataggctggggagattgtttaatggataaaagcatcttccacatacttatgaggatctgagttcgaattcctagaacctatataaaagctggaggcatagtctgagcaaagacagtagtagaatgattaatgactggaagctgaagggctagctagtctggttttatgcagcaagaaacagaaaagagatcctatctcccaaggaaggtgagacctgaaacctgaggctgccctgagtcctccacaaatggtgcagcaattaaaaggtgtttaatcccaaataacccttctagaaatgcatagtgaccctttgcctggccagccgggagaggggtgtgtggccagctacttctaacccacccagcaaggctgggaaaagatgggggtgggtatgtcagagcagcatgcaaatgcgggcctctaatcctatcaggaatgctcagggtgttaatttgactatctttcacagatcataaatctccttgggggcaaagctgccagacaccatcaagccaaacccttcagtggctggcagttggagcgtagcagctgggatcatgcctcagtaaagtccaataaagagctttgtaaggagggctggagagcagcttctcacatttggatacaatggagcaaaacagtgggaaatgtgaatgtctgattatccagacgggtggtctcccgggtgcccttcctacccactgagccatggatccttactcattcacaattctgtgcacgcaggcggacccatcttactcccaatggatatcacaaactcacattggattagttttttttttaatccctgtctataaataacaaatagactatattcacttccattgcaaactgctagcctttttatatgaaaatccattaacctgcagccaggtcacttctgtccagtcttttgttcagtgatcagaatggaaacattctccttcaacagagcactgtgaacaaatgtgtggggttgacactgtcactaggaatcgttctttccatgacaacttcatcctgagtccacctgaccttacctgggtcattttgaaatacaggtgtgtttgtgtgtttgtgtgtttgtgtggttatctggagagatggctcagcagttaagagcactggctgactgcccagaggctctaggttcaaattctcagcacctacatggtggctcacaagaacccttaactccaggtccaggggatgagatgcactcttctgacctaggcactgatttctgttggcctccttggaaggtaagctttagtgtaaatctggtatatctgtgaattggctgggatgaggaggaaattggggttcctttaaagccctagcaagagctgagactgcaagaaccagagatagctacccatcctgaacctcaatggggtacatgccagtggctttctccctatgccaggaacacagcacatttataatgggtgaatttctgaaaacaggggtgtcagaaaggactccacttaccagtcatgggctttgagtttaattcttgaggtctcctgccctcatctgaagatggatttaatctctaagatgtaattatctggcccagtgtatagagagttgggtgatatatagtattgatgtaactggtggatttccgaataactatgattggtatgatttttaaaactgaatatgcatacacaaattttgtttcaatctacccactactattcctccctcctccagtgattcccctattcccacccttccttctcgaagtcatgtactaatacccagaatccatttagtgtttgaccagatgtgagcagatgtgggaccatctactgcagcttggatctggattcctgaaaaaaggtactccccatttgccaagtagcttgagagacaagggaaggacttcacaatcccctcttctacctacacatcttcttagatttctgttagcttgagcttgctatgtgtgcatcagcacaatcacatccagcaaagagctttgttgcagacatacttctagttctttggattattttagtccccttttttgtgatgaccctgagtcttgggggaggatgtaacacagacactcaattttagagctgagtacttcataatcttgttcttggccaattgatactatttttggcagtcaacttttttggcttacttctattactagttgtaaccttgccatgttactgctccagtgtttttactttactctatataatggtgcgcagactttagaaggaatgaatgagctggggagatggctcagaggatgcatgctgcacaaacgagaacaagtttgaatcctcagcacccatttacaaagctagtggtgtgtagtaatgtgtaacaaaataacatgctattgcatgaccagggcttttatgacaggattgtctccctacttttctgatacccaaagtagatcagttcccagcagtagccatgccttatctatgtaactcctgattacagtacatggctaacagtatcaatgggtttctttggaaaagctagccattcagaccaatccctccacactgggtttaaaccccattaataaccttgagttccttttaaggttaggatgccaatcaccactcttacaattggagtgccacactctagtgtttgttgccacattcccctctctgttctggggggagggggaataaagggtttgggtgatagacttctactttttctgagttgccttttattttctcattgttttattattttaggtgtatgcctatatatcacctgcttagcacaggcctgtaatcctagtgccaaggaggctgagacagaattgagtttgagagcaccctgggctaagaagacttgtttgaaaaactcaaacaaataaaatagttatattttattatgtgagaacatgcgatggggatgggtgaatgtgctcacgtatacatgaaggagcgtaactcagttttttccttccaccatgtggatcccagggtttagcctttacttgctcatccagacactggctttgtttatttatctaagagagtgtatctgtgtggtcctggctgtcctagaaatcagtctgtataccaggctagacttgaactcaagagatccacctgcctttgcttccctagtgcaggagttaaaggtgtgtaccaccaccacccggttctagatactcgttcttggtttctctgtgtaaccctggttgtcctggaactcagagatctgtgctatcacacctgactcaaattacaacaatttctagtcttttgcagatcaacaattttataaaagaaaatttaaaatttgcattacttatttttttagagtgctctaccaccgagtgacatccttaccctttccccttttccactgggtggaacaaagagtatgaagacaatgcccattagcagagcacatttgtgtagactgctctatggtattatggcataccactctgggggctccctgctaactgtgttatgggaatagtggccgtgagtgagtacccacatggagagggctaactactaactactaataatactaactacgtcaggcaacaaccaagtaaggcaagaaacatatggtgtatacagtgagaggcagtattcttggtctgaaagttctggtgacagggtcactgaatgctttctgtcactgtagttcaacagacaggacaggaggtaaaggcacagtcaagagaactaattgttaagagctttgggaaatttattcgcatgttttcttgcctcaatctgcaaacaattggatcacatcatacgtgggcatgcacactcaggaaacagcaagcaaacacttcaatatcatcttaaatgaagcaggaagataaagcagcttacacagacttaaagtgagacgtagggatacttgtaccatcactctcttcttatggaacgctgaggactgattacatacaggtcattagcatatggaaatataaaatacactactttttttccttttagagaaaaaaataccactaactgagatttggaaacttatcaagaatgtttttatgacatagaaaacaaaaatatatttctctttctaagttaaacagactgattttcatgagtgagtatttaggacttccgtcacattggatggtataaacgtccaaacacattctacttctatcatgaagcatctgagtaagaatggccataacactcaacgttttacgtttatgctgcaccctgacactatcagactcaaaactacattgttttcctgcaattatgactttttgtaatctcaatgaatttctcaaggaccattcaacacatttatactactccagtaattaccatgctacccagaaagcaagtaaacagtttattaagaattaagtgaggcatggaatgtgatacaagtaagacactcagatgggcagaaaagcactacactcacacacacacacaaattaaatttcacttcaaaagaaaaaaaatcacaaggcaaaagaaaaagcaattccatcattataaaataagtatttcatgcaaagcactaacccacacccccaaactcccatctcccaattaacattgccatgctagcgcattaatcacagtggaaaacaacacaaatatgcaatgggttagaggaagtaacatagctcataactagaccatgattttatatgagaaaaatttccagatccatgaatagagtaatattggccaaacttttagaagtatgcaaatataaactccatcaattcatttcattatcttctacctataaaatccagaagctttcagaacctgaatattttataaaatttggcatgctccttttaatgttccaagaaatgattttaggattgcatttgttattaacagagagctgtataaaagcatatccaggtcaggattttttgacctcttaaaccttgcccacaatttgcatcatagtaacaactccagaaatacatttctcttaactcataggacaataaatttgactttcgagcaactatatgtacacatttctatcaaggatcagttaattgagagacaaataaatgccaacaaagataaggtgttacagacagtgaagaggatgtcctcatttacaaagacttaggtggataagaacctctccttgactcctgagtgtgctgaggaaggtaggtggcctctgtgcaagatgctgaggaaggtaggtggcctctttgcaagatgctgagtacagggcttacattagagaacagtctgagtggcctttcagggaaagtaatttcttccatagctgccacactgaccatcagcctgtgatggagtatttttaactgggcagaatgccttgacaggagtaggaagcactgggcttgtgcattccagaggctacccacaaatagatacacttatatttatggttctgggttgtgtttactcatgataaatagactcggctataaataaaatcatgaaaaacttaaaaaaagtacccactcccacttgctattcatcctttttagatttaaggtaattagaactgataggaaaattgtccatgattgcctttcccgtgtctgaaacttctacttacattccatgatcagagcactcagtgttcagaaaaacttggggaagcttgccctctctgatgtccataacatcagaaagatttctgagacaagaaccagagtttgaggccatcgaagacacttctttagccatcagtctccacatcaacacaccagagctctatggaatgtgtgccttgtagatacaaaggcaccacaaattaaattcccagagtattcataaaattcttaaatgagaaaatattttttatgtgagagaaatgcttccatcagcaaattgaatttgataaatcaacgtttccccactaagtctgcaccagcaaccgagcagcctctggaatcaaatgtaacgatcactcaggcaatgacagatgaaacacagatgagcaacacatatgaaaatactctgtaaccgctgcagctctagaacagtttatagtacaaagcaatgtaaataaatattgggctagtacaaaagctcttatttacattttacaaatgaaactgtattcagtgtaaatgctgtgttttaaagaacacagtactgattagtaaaatgagttctgttgagggcattaccatttttgttagaatcaatacacaacgtataaaagattcaagttaactgtttataatttagtacagataaacccagttgaacctggaatggcatctgttaaagtgctgaaaaacaggaaatacttagaaacactgtacattattaaagctttatcgagtcagaatgttaaacttcttcacatttttatcgttttttgccacaggcctgtagtcaggatgaatttttttccagccaaggagtgaaactgaagaggccatcagctgcttcggtactttaggtttggtggaattggtttcagccatcaaccataccttcaggccttacaatctggtaagtaattaaatattcagggtaagcctgaaaaacaaagattagttcaaatgttggtgtgttttgttgcatgttaaggtgtccttgcataagcattccaaaccttgaggagttctgtaaaccagaactacctagagatctttctctaaatattcctaccttgactctaacccttggattctcatcagaggcaggtctaaggtgagaattaagtacatgtttgtctgttgtcagtaactgaggggactctgccaccaattctgacttataatactgctctagaccagcttttcattaggtcttggtcactgacagcaagaaagaattaatcattgctatactttacaggaaaaaaaaaaagagggaaaaagatccagtaatgatcgacaaactctgaataggttagatagacacaccaatggttcttttcttaattttgaaaatctatgccaaacattttatttgtaagtttccaagcctgaaattaccctcctcccacccaaatccatttaaggcaacatgccctatccgtgtaagagccacatactgttggagacaaacaaatccaagtagagtgagtacctgttctcctctgtaaatcacatactcagctaacgctaggccattcacactgggccggccagtgactgagtgatggccgggaggagaatgtgccattttcattgcactgaactgcaggaaagattttcctaaggtcactcggcaaaagagcagctgcctacaacatgaaaaagaaaaatttaccctgaaaacagattgaacacaaacccagaacagtaaagttttgttaataaccatttccagacaaccaataaatattatgttctaacaacagtttaggggaagtcagagaacattgcttattattaagcatcacaaccatggaagacaagtcaatttacagaacttgaaattctgtagccccttaaatagtacagatttgtgacccaaaacagaaatggtgataatttatacccagagggacttcccaatattaatacataagcctaaacttgggagaaaaataatggcagcaagaataaaacaagctgggcctagtgaatactggcattcaggaggctgaggcaggaggtttgaagccagcctgtgatagagtgagacttgtcactccctgcacccgcccccaccacatgagtgcatgagagggagagggaagaagggagggaagaagagcaggagagagacaaaggaagggagagcaaggaggggtgggagagaaaaagagggaggcaaaaaagaaacagacaagacaggaaacctggaaagtaagactttctgggtgtgcgtataagcggagaggaggcattaattcttttttgtttttcaagacagagtttctctgtgtagccctggttgtcccgtaacttgctctgtacaccaggctaggcttggactcacagagagccatctatctctgcttcccacggcagggattaagcggggtgccaagagagaagtattgctctagcacacttctggatcacccaggaacttggtgaaaaattggaaaatccagtgctatatagtcttatccctgcctcactaaatatcagcaatgcaagaggtggggccttgaggtctgtatgcgtgtttgtttttccaaggtttttatattatgggcatgggtatttatctgcatgtatgtatgtgcatctcatatgggtgcctgctcaagggggccagaagagggtgtcagatctcctagaattgggagttaccgatggttgtgagtcaccatgtgggcaaaagaaactaaaacctttgtctcctgcaagagcaagttctttactgtggtgccttctctctagactcagcagtctgcattttaacaaacgtaggtaattttggcatatcctaaggcttgaataatattgctcaaacctgaaaaatcagggccctaggtgtggcgtaaatcttagtaactaatgttacttatctcaccaacggcagaagatactttgtgcctacaaagattttgtaaattaaggccaagttaactgaatgatttaaagaactgagaataggcaactaactaaaagaggggatgtgcagagcagatgtctgataattactctctaaagataattaaataattttaattatttctcttatggatgtaatgttagaaactgaggattaggatagtataatgaaaaagaaactcctatagaaattaccataagatgagtaactagtcagtagcattgtgtatttgtgtgtaagtatggtgatgggcattaaaccccaaacctcgttcctattaggcaagagctaggtatttcattatgtccccagaccccgaaaacaagctttctggaatctacaggcctgcaatattcaaaggctttaacaacaatctccaatgttgccttctgtccagcagttgtggggtttttctcttttttttttttctctcacagtgattcacctacctctgcctccagagctttgatatgaaaggcgtgtcccaccatgtctggctatttttttcctccttgagatagggcttaactctgtttacctagtcagccttgaacgcctattctccccatctcatctgtcaacataggtgggcaatagatgtgcactgccttgctggctctccttagcattctttatgatgtaccaagtattcaaatgagaaattgaattaaacaggttaagtgcttagaatcatgctagctcatttagattcttcagtaactattagctattattttaacttgtaaggagacaaagtttaatctggatccttcactgtcaaatatgtcttgccccccatgctcctcaaatctgtggttagttctcatctaattattcccaagacaagtaataagaatctctcacctgtggcaaatgtaacacgatctgtctttgtgaatcggacatccagtgccgcctccaatcccatatacatactgattgcttttggaagagttttcagcaaaataaatcccagccccgaacatgccaccaatgtacgcatgcctttcatcaaagcccttatggataatcgcattcacaaaaggagaccctaaaatacaaacagatgggtaacaacaacttaaaaagagaattagcacttcggggaagttaattttcccaaggaactaggattaaacccagggctttgtgcatgtcagtcaagcactgagctacacacccagccctgagtgttaaattcttttgttttgtttgttaagagcacaggctgctcttccagaggtcctgagttcaattcccagcaaccacacggtggctcacaaccatctgtaatgagatctggttctctcttctaaccttaaccctaaccctgcaggcatatttgcaggcagaacactgtaaacataataaataaaagaaggtacaacaatgcatgtatgtttaaaaaaaaatgttcattgtaaggtacattatcacaaaagaaactgaaaatatgtacacaaatataaaagttacagaaatattatctttattaagaagacataaataagttgctgggcagtgatgatgcatgaatttggcaggcagatctcagggagtttgaggcctgcctggtctatatagtgagttctaggatagccagggctacacagcaagaagataatgatgacaatgacaacaaaagctccaatctcacagggaggacagggtgagaacttaccatgaaataacatcctttcatttgcatggttgtggttttcttcagaaacttctttcctccggtgcgtgtatctttcccataattttttgttacaaaccttctgaatctaaacacaaaaaaaataaaagtcagcactaagtcaccactgaaatcccccagacatgctaaattttgtacagactttatcagactcaaaatacataaacaaggcagctggagagatggctcggtggttaagagcagtcactgcttttccagaggacctgggttcaattcccagcacccacatggcagctcacaactgtctgtaatttcagttccaggggacctgacatcctaggcaaagcaccaatgcatataaaataaaaattaataaaaataatacacaaacaagatttgaaatagccacccaccacacatacccccaccttctttcctatcgtttcctttccccttgagcttctactggagtatttctatggtcaaatggacactaagtgcttcagcctctgtgatccctaggagcacacatcagagctgcagttttagtatgggggggggggaatcaaagtactggtaacagatgtaatcaaggacaacacttggcaccaactgaccttattcatgtataaaatagaacaaaaataaaatcattttcgcatacacgcacgcacgcacgcactcgcgcgcgcacacacacacacacacacacacaattcaatgttgtattgaaacacctttaaggaggaggaggaaacagcatgtttttcaatttgaacacagtaatttataaatcagcttctcctatttcctgcttcacaaacattatgtaagtgctcccttctctgaataatctaattgtagcagacacaatcaagcaagtcaagtaaactttagtgctcactagcctaaaggatgcattcagttcagggcatactgacactgttctgtaagtttattttattttattttatttattatgtatacaacattctgcttccatgtatatctgcacaccagaagagggcacctgatctcataatggatggttgtgagccaccatgtggttgctgggaattgaattcaggacctctggaagagcaatcagtgctcttaacctatgagccatttctccagctcccttctgtaagtttttataatttttatttattcatttttttcaagacaggatttctctgtgtagcctggttgtcatggaacttgctctgtaggccaggctggcctcaaattagagatcagcctgcctctgcctcccaagtgctgacattaaaaggcttgtgccactactgacagtctagaattttaagttttgtaggacagtcttccccctcaatagttcctgaagccatgtcaaaaagcaaggtgctggacagatagtatgttcttatcaagactacttaaggctttgggttgtggaaagtaacagtcttgggaaactttattttcactcatctgttaccttgagaatattgtatctgttgaagatgccacctgcatgacctccatctctgtgctctcggacagtactttgcatctgatgaaaagaatttaaaacacaaattagttttgtcattctgatttgtgggaacatggttttgattcatttgatcctattttttgagaattcaaggtagttttaatacttttcttgaaaggacattaattctataaactcatgactacatttttcttctttcaagacaggttttctctgtgcaggtctggctgtcttagaactcaatctatagaccaggctggtttcgaactcagacatctgcctgactctgcctcttgagggttgggattaccataagtactatgttctagagatgactattaagcatcctgaaaacatatttatagatgaaaagttacataatgtaaaccaagataaaatggaatgtagaaatatgttaaacataaaagcatggtctatttgtgctgatattaaactaataaagcacaatatatattttcttgtgagtatgatctttagaacaaaatctcactgaattttgcatatgtgcttaattcaaacagatgaggcacatgtacatgagagtgtaatgactcttcagtgaggtgtgatggcacacacctttaatccaagcacgaggagtcagaggaaggtggatctctgagtttgaggccagcctggtctagagagtgaaaaccaggacagctaaagctacatattgtttcaaaagaatatgtagctaccttgctccccctgctcccccccaaaatacataggaggataacttttctaagatttcagtggattgaagaaatctttgaaaagaaaccagaataaaaatttcccagataaatactatctacatgttgagtactatctgagattcctcactttgtaattgccttcataaagggagtgaatactaccattattttcaaatgacagagaccttctccaacagaattttggtttctggttccacattaatgaagcagttagtgatccaagtatctaaaactaaggttaattaagaaatccattgagcagtgactgctcttccaggacccaggttcaattctgcagcacctatatggcaccttacaactgtctgtaactccaagatctgacacctttatatgaatacacatgcaggtgaagcatccatgcaacataaaaataaaaattaaaaaagaaagaaaaaaggagtgggggaaaaaccaaatgcattgtaaatacttccaaattctctagttggtgaaagagggacaaaaacccaaaccaaaacaaaccaacaaaaaatgacagcaacggaatcaaccacatgagtggttagatccataatatccattttcttaagcgtgatgaacatacctcttcctccacagattgaaactctttatcatccggagacagatctatgagaattgttccactaccagagttgtttagagttaaatatggattaagacctatgaaataaaatttagaagtaaaaattgccaataaaacaatccaattcaaccaaccccaaaacaatcacatgatttatccgacactaccaattccccaaaatcttaatttcataaaaatttggatttataggaatgcaaagtgcagacagggacatactataattgtcagaacttactaacataggcttcatttggactgcactagtttttcctatcaatgccccttttcttttactggataaaaatcatggtatttttcagtgtgcgtgtgcatgtgcctatgtacacagaggccagaagtcagcatcagagtcttcagagccgagttagagatgattgcccagcttgttattgctatgtgtgttctgagatctgaactgtggttttcataatccggcaacaagtactcttaaccactacagactcatttcattttgtgtgtatgtatgtttgtctgcatgtatgtatatgcaccatatgaatgccttcagaggcccaaaaagggcctgctggggctagatttatagagagctgcaagcaagtagctatgcgggtacgggacccgaaccctcatcttctacaaaatcattacaccactcttacctgctgagccatccctcaagtaaccccccccccatcctggaacttgttttggagaccaggctggcctcaaactcacctgcttctgcctcctgagctctgggataaaaggcgtgggccaaaacatccagcttaagtgactatttttttgtttttaaagacttatttatttttatgtgtgttttgcttgtgtgtatgtctgtgtaagggtgtcaggttccctggaacagttgggagctgccatgtgggtgctaggaattgaacctgggtccactagaagaacagcagtgttctcaacccctgagctattttctccagcccattttttaacctgacaggttatagtgattttagggactatttataaaaatcccctttcccttttcttttattgctaatgagcttataaacatactttttcaaattacttactttagtagctgttcagccttttattttaataaagtaatccttttactttctgtaactacgaggaaaaatgatgacggagacttgaacagcctcaggcaattaaaaaccatcctataagctcataacatttgctacctgaccactgataaaaattaatattctttacttctaccatttgtcatgctttctatttttattttaaaattttccatgtgtatgaatgttttgccttcatgtatgtctgtgcaccacgccaagcttgatatctgcagaggaagagggtgctgggtctcttgaactggacggagttacatacagacagttgtgagccactataccagtgctgggaactgaacacaggtcttctggaggggcagccagtgttgagtcatctctctagacccttgtcaaggcagactgcagagacttaactatgtctgtacaagtatggggtccatatggagactattcacaccctcataatcccaacaagcaggaaggtaagaggattctttgagtttggggccagcctagtaaaactctgcctcagaaaaacaaaacaacacaaaacaaaaggatacctccatgaaatcaaccccctccccccaaccaatgcttgatttactgacctgtagcccagtactgaaaggtcagaaaaggctttcagtcatcaagagcagactgtcagaggaccttctagacagcaaccaattcagctttgcaagatggcaactttatgaagaatagtgactctgacaagaacagccactgtgccttaagacaagtttcttccataatggaaaaaataaaaaaggttcccatccaaccacagtggacatatcggagtgacagtaagtcctaagtagcactgaggtactttcttctgctacctgcagtcagtagatctacttctatcactggttcccgagccttggaatgaaatacagtgccaacaatcaagaagcacctacctgtacaaacaccatttagttttcactcagctctttcctaaaaccaggcatctattacaactgctgtaacacaggatagacaccccagtatcctatcataggtgggaagacattatttcttttgtttgagacagggtctctctatgtagtcctgaaacttgttatacaggttaggctggcctcaaatgcacagatcctcctgcctctgtttctctacatgctgggactaaggacatgagggagttgtgggattttctttcatttgacattttgtcattatattagtcacagtccagagtaacctcgtattttaaatactgaggcccagtttctccaggtttaaaggatttcttagtgtaaaacaactttgagtggtctttgtttttttttttttttccttcaagaagtggacgcaagtgctagagagccggcttggtggtgaagaccactggccactcactctaccaggacctggttcccagaactcacaaggcaatggctaacaactgtatgttcctgttgctccagagtatctggcaccctcttctggcttccttcggtactgaatgcaggtggtgctcacacatccatacaaaataaaaataaaaattgaatcccatcctggacagcacatatttttcctctctgaaaatcctattcatttttgtaaatagaaattgttcttcaatcctagttgtacagcttttattttaggatgttttaaacatttattcttcttttgatgtcaccaagtgacaggttccattctggccctttataaacacacattgttatactctgtccttactgtcctcaccctactgttttctccccctccttttactggtctttcctgttcccccttgctttctctactttattccttttttttcccccaagacagggtttttctatgtagccttgactgtcctagaattcattctgtacactagaatggcctcaaactcaagagatccaccatagtgtgtcccccaagtgctgggattaaaggtgtgcgccaccacccccaactccctttctgttttttataacacatattcctctatcccttcttgttcttccccttctcaatatcccctttctacttccaaggcatacatgcacgtatttaaatctgggttacacatgagagaaaacaaatgctatttatccaagtctggagtgctttcatttaacataaggagcttcagggagagctagtttactgcaaatatcataatttcatccactacagctgaatagaattgtatacacgaacaacattcttttatatacattcatctgctgatagacatctaagctggctccatttcctagttcctgagaattaattgtgtaactggatatgcaactatctctgtggtatgctggtttagagccctttagatatagaccgggggagctgggctttggtgacacacgccgttaatcccagtacttgggaggcagaggtaggtggatctctgtgagttcaaggccagcctggtctacagaatgaatgccaggataggctccaaagctacatagagaaactccgtcgtgaaaacaaacaaaacacccccccccccggcagtaatgttggatcataattttatttagttttactgatatctatagtagctgcaccagcttatgttcctgtcagtgatgtgtgagcatcagggtaaatcatcatttcaatttaatggtaaagtcaaaaatgtggtttttgactcttaaaataattgacatttttacctagctctggtacatacacatgttaacgtctgttgagtgatgcaatttgcattttccttcagctaaaacattatgaaaatcatttctttttttaaaaggtttttatttattttatgtgcactgcatgtatgtctgtgtgaacatgcgatatcctctggaactggagttatagacagttgtgagctgccgtgtgggtgctggaaatgaacctggttcctctggaataacagtcagtgctcttaaccactgagccatctctccaagccccaaaacgcgatgtatcttactgactgtctaatacctaatcattacctaacaccttacccatgctccagaccttttaaaattgtaacactttagagctagagtaacttcattcattataccttcccattctccatgaataataattctaaaatttctgtacaggccaagaaattttactttgggtcatatatttaacattagtagtgtcaggaagttctaactatcagtagaggccttatctgtgttcaaaaccccattatgctctcctttagtaaaaagagtctgtcacagacttccaaagtgttagactgaggctacctttatagaaacagctgtcaaccaagtatcaaaatgaaataccttgttgtccagagatcagtctttcaacccctttaattagcttgtgtcgatgtccataagcattgatcccaatctctttcagctccttgtgtcccatctcaactagcacatccaaggtgatctcatgaaagagaatgaaatattcagaatgcttgctcatttggtagacactcatatattttcataatatttatttcacatttttattaagctatatattttatgtatatgaatgttttgtatgtttgtgttgcactgcccctggcagccacaagagggcacccccacacaactggagttacagttgttaggaatcaaacccaggctaccttgacagctccatttcttactattttgaatagttttgataggaaaacaaatcatttgctaaattcaaaaagttggagcaaaatatgttgagtcataaatgttattttaagtttcatctttccactgagccttctcaccatcgctctacatctaaacctttacacagggcctcgcatggttcctccaggatgtggactatgctaagtacctctgcatcactcactgttcaaactcttacctaaaataagtcatttctgtttcatgaaattgaagccgttaatcctgtttcacttatgcaacttctacaaagccactcctattaagtccagctaatggtaatcttttccatcttgaaattaactaaaatctttgtcagactgaaacttttcatgtttttgttctacctccaggttcaagtctacagtaattataatttctgaactatcacagcagcaatgacaacaaaacaagtataggtagcgctagagagatagctcgtttagagtacttgctgctctttcagaggactactggggtggctttcaaccatccataattccagttccagagaatctgacacccttttctgacctccacaggcaccagtcatgcatgtggtacacatacatgcaggcaaaacacccagacacactaagtaaatcttaagaaggataaggaatactttaaactgggctactcagaaaagctcaaatgtacgactggcacacccacatcctgtccactgtaggtggcagaatgtcaggcttaagagctggtggtgattgaagtaacagaacggaagaagcagctcaaaggtaacttaattcaagggctgaataaggtaaccatgtcaccaaggaggatgttctgttacatcagtcaatttttagatatcatgaaccaagtgagactccaaagttaagccaaatcagaagtgactgatttccagtctcaaacactttcagagtggtagacactagtacatggtacactcagcatgcagaacgccctatgaaaacatttcccaatagcttataaactttaagtaacttcaagcattttctagattttcttgagtttctatcaaatactaaaccaaacaatacaattcatttactcacctgttctcgctcaaatatatccattaagtgctcaagcccaagattccttatgaactgaattatactaaaatccactcctggatctggaaggaaaaagtcccgaacaaaatttcacatcagaataatgtacagcaacactgtaaatataaaagctctgttctgctactacatatgtgaagaatatatcaaagaagcaaaaaaccaacagccacttacaacttatcaaaatttaaaactaacaagaatcccataaactttttttttttttttttgaggtgtggtctcacagtatagccctggctagcccggaaggcactatgtagaccaggttggcctcaaactcagaaatctacttgtctgggtgtgtgccatcacgggcttaaacagttaagcagtgggctttctcatgtttaaagatttctcattttattttcattttaaattttacttttagcctcatcttttacctttaaacaaacaaacaaacaaataaaaaaaatcagccttttgccaggcagtggtggcaaatctccgtgagttcaagaccagcctggtgttaggatgggttagggctggggagatggcttagtgggtaaagttacctgttgtgcaaacatggcaacctgagttcaattcctggaacccatttaaaggggaaggaaagaacctactttttaaaaagaacctctgatctacacacaccacacacatacaaccatggcacaagtttgcacatatgtatgtacacacacaaaaaagcaaacaataaacaaataataggtcagtagtaccacgttcaccaactttcgacttgaatggaatttctacaggaattctatttacattattaatagaagacaaataaatgtgaatactttcaggctattttaatttatttcacatagagagttatatttaagatttaaaggacaattcctacgaatctaaatgacaaatatggagttacaataggagctgtaatttttacagaatttctcaccttcttttctttccaaactggcagcaccttctgttgtacttgaactaactactgaggacagttcagaaaaactcccagataagttgtcaagactgctggctgcagaaaggcttgaagggctggatggacctgaagacagagcatctgcagtggctccagggcttctgacaccattgagcacttgaggtttatagcatgaaggtagagcagaggggggcatggctgctgtcaagagagcgctgacatcatctgcctagaacacatttcaaggaggtgaaatctgtcataaacaaggtttacaattctcctatgactaataaaaataggacgacaaacctagcaaactcatactggcctgttatcatacaacactgagaaatactagaaaattttaagagtgaaacaacaggctgatacctagagctaactaaattgtcattaaatataaaacataattcagaacactcttccaggtcacatgtaattaaacatacaaataaaaaactgctaaatgttgtgaagtatggatgatgaataaaatgctaatttgacaccatgacacactgaaattatttacagaactaactgaaaaagaactttcaaccctattacaatttaactctgacattagcatttcaacctatacagaactttagcaaacagaaccacttgtagtttttagaaaagagtgatttattactcaaaactgagagaaccttgtttttgttttttggtaaacggtaattttaatcaaactgctaggaagaaaaagtctttaaattcagtgctatatccacttcattaatcacatacaattatttaccatgctcaaataataaactaagtaatgggctggagaggtggtccagtgggaaggtagctgccagtaagcctcatgacctgagtttgatccctggtacccacatggtgtaatgagagaatggactcccacaagttatcctatgacatctacaggtatagtgaagcacatttgggcctcctctcctcaataaacaattaaaaaataatatataaaaagatgctaagtaatcatcaacagggatgctttcttggttagtcacttataatgtcaacacccttacctttttcttcttcaatttgtgcatctcttgaccttatagtttgcatatagtattatttatctttttaaaagaccatttattgggtacattttggtacctgaaactatctaaaggctttagatagcattacaatgcttaattccattaactatatgtattttatcccttatagatgatgcttctaaactgtataggataactaggcaactagcaagactgcaactttaagtggtagagctggagtagtaggttgtgcctatttcagtctaaagctcacgtatgctttcactctctcaaaaaccatctttaaaattttattttgtgggtatgtgtataatttgtatgtatgcatgaatgtataaatccatgcatgtgtaagttaggactcctgggtgttagacctcacttttgactatgttggagatggtctcatcagcactgtgatgccaggctagctggcccttgggtttctagggagttcctatcgctcacatatgttcaaacatgtatctagattttatgttggttctgaagatccaaactcaggttctcatacatgtgcaacaagtgctttactcagtagtccatctccctaggccctatgtattatctagagccttttattttccttgccattaattttatctggtgaatcggtgtttgggagggatgaattctaaatgcttacttcttaatcagtttggaaccaaagtgacatttccaagaattccttgcacaaatatggtttggtaattagccttcgggtggaacatctctttaaatctgaatgcagccaaacagtttcttggtcaatcagttggaataatctctctccacagaagacactttctttcccatttcaaaacatttcttacattgtgtggtgacacaagcctgtaattcctgaacacttaggaagcaggcaaaagattggctcagtagttaagaacccttgcttttcttcagaggactcagattcagtttccaggcaccataccaaacggtttacaacctcctgtgaccccagtcccagaagatcataacacatacagactcacatacatatgcataaaaataaacaaatctttaaaaacaaaaacaaaaactgataaacaccaagttccaggccatccaggactacataaaagatcctgtctcaatcccaggagaacaaaacttttcttccttttactttactgctctggtaaataaccttggtggcaaagttaaggaagtcctgttctggtgactgacacagatttgggaatacaaaagaggttcctacatgagtggacagggaaagagaaggaaaaaacccacattttataaaccttaaaaacaattaagcattcatttcatttattttgtgtgcatgtatgtatatgggtgcatgtctgccaaggtgtacatgtggaggtcagaagacaacttgtggaaggcagttctctcttctaccacgtgggtcccgggactaaactcaggctgttaggtctgacagcaagcacctttaccagctgagccatctagctggctctcccatagacagctcttgtagggtaagcactaacaccaggaagaagcatcgaggaaggacaaagaatccctgctagcagcatgttttgaaggataacacacctaactggtgagttgctatgctcttcagtctattataccatgcacaacagtatttacaaagggcccaggcctgttttgtttcccaactactgttctttcccccacatccaaagtacttagtatatagtaactgactactaacttatctacttatcccaacaccaaaggattcctaaacttaaatttgggctaaaaccatattcactatgcagacattttatgcatgtcatgtgaactttctgagtttccaaagagcccatcacttactgaaactaaatctaaaggtgtttgtccttcttgatttttaagagtaggatcagctccatgggccaacaataaagcacaaagctgtgtccgtcccttttgggctgcttcatgtaacggtgtgaaagcccatttgtccgtggcattgacacacgcattgtactttatcagtaaagctgctacgtctacatgctgtaaaagaaaatattcctgttacagttggaaatgttttatggcattttactttttaagaaactggttttgagctgggtgtggaagcccatgcctttgaccccagcactcaggaggcagaggcaggcagctctctgtgagtttgaggccagcgtggtctacacagtgagttctaggacagtcagtgctatgtagagagaccctgtctcaaaagaaaagacaacaaaacctggttctgtacctaccttcttattttcaaacttactctggaaatgaaaagtaaagctatttcttctcagcattgtaacttatgggcagttgcttaagaattattgtccagaatctgacataggaaaataaactaaaacaactttagtgatttctaactaattcttgtattataactggtgaatataaatttacaaactagcagccttcctcagttattctaactagaccactggcaaaggccaatgctgaccagaatcttcagggttgttggaagtctgtaacaatgtatctgaatctctataaattcctttgaaacctatgaattttctggacacacattcacaaatcagtatttcatcaaagagataggtgccgaggatactacaacataggacaaatatattgccatgtcaaacagcatgcctgtaacagattaagaactaaaacttctgttatctaacttcttatttagttctttgtgaaacaagtcacagcagattccatgtgaactgtgacactgatacccactttgaaaagctgcatgaatttggaaaggaaactgagaagaacttaccccgtatgatgctgcgttatgtaaagggatgagtcctcctttgtcttgggcattcacatcagctccatgttgcaataagtactctgcgacttccaaattattgtaaccagctaatgcaggaaagaagtaacattgctttcagttataaatgtagaaaaatcatgtgttacccatatagctatatgtttttaaatagatatttctaaattttatgtaaatctgaaatgattagtattttgtcttgtgggaaagaaatacccaattggtctaaaattttagaagcttttggttttggagacccagcaaattatagaaagattttcctctatccatttaaaactcccctacctccaaaacagcaggatctctaggacacaggacaacaacaaaatatccaagaggagcccaaagagagcccattatgggtggtgagtcagaaaccagaggccttaaaccagaccaatgactcgtggcaatgaacacttgcaaggaaagatgaatggactaaagggtaaactgtgtgtctcaaatggccacactacagcttccatgagcagtttcttccccaccaaaggccctaccttcatggctgttacatacaacaacctaagctcaggcgtgtgatcccaagggctaaaattcacaggcacccaatcatctagctgcacaacaggaggcattcttcctcaggagtctgtagaaatgcctcagcctaaggagagtgcttaggacacatatagtagagcaacctcagaactattaagaaagctcatttagtactctgaagcacgacataacctgtatcttatcagttagctcagaattctcttatggcaaagtatctctagacacataatcatagatgaagtaaatgtcatttttcccaatataaaaacaatgataatggctttaaatgttttgtctatcagtgcacatatcagccatcccttagaaagatttaaagcattaagaatgtcataggtgtagtatttgtgtatatacatgggtgaaggtagacgccagaggtaaatacagtattttcccctattgctctctgcatctgtcgcctaagacatggcttctctatgtggtcttccagaactctttagatcaggctgtcctgcaactcagagatccatctccttttgcctcccaagcactgtgattaaaggcctgcctcgccaggcccagcagttttctacttaaaaacaacaacaacagggctggagagatggctcagaggttaagagcactgactgctcttccagaggtcctgagttcaattcccagcaaccacatggtggctcacagccatacgttataagatctggtgtcctcttctggtgtgtagatgtacatgaagcagaatgttgtatacataataaataaaatctttaaaaacaaaaaacaaaaaaaccccacaacaacaacaaaaaacaagcacaccccccccatatattactcattgtctgtgcatacttatagtatacatcacaggtcagaaaacttgagggagttgactctctcccttttactttgtgggtcccagacatggaattcagtttgtcaggcttctctgataaatgcctttacccactgaggcacctcacagatcctccacttgactatttgaggcacagtctctcactgagaatggagcccactcattcagctagtcaggtagccatcaagaggcagagatgctctatctttgcccctcagtgcaggagtgtgaactcaagttcccatgcttgcatggcaaacatttcatgacagagtttcttcacagcccaaggtttagtattaacactattagaagtgagtagacacattctgtgcttaaaatgtatttgcaacaacaggcagtggtggcatacactttaaatcccagcactcaggaggcagaagctggtgggttctgagtttgaggctagcctggcctacagagatagttccaagacagccagggtacacagagtaaccctgtctcaaaaaaaaaaaaaaaaaaaaaaaaaaaacaaagaaacaaaaaacataaacaacaaaaaaacaaaaaccaatctatttgtatttgcaacttacgaagacaatgtggacttaaaatagtaatgtcaaggactagagagatagctcagctgttaatagcactggttcctcttccagaggtcctgagttcaattcttagcaacaacttggtggctcacaaccatctatagtgggatttgatgtcctcttttggcataaagttgatagagaactcatatacataaaataatcttaaaaaaaaaaaactagtaatgtcaaatgttctagataagagctggagaaatggttcagcagttaagagcacttgttcttgcaaaggacctagatttggttcccagcatccacaaggcagctcgtaagcatttgtaactaactgcagttctaggggatccaatgccctgacctccaccaggtatccggcacacatgtggtacacagacatccacgcaggcaaaacacccatgttgtaaaataatctttttgtacgctgtgaagatgtttctctgtcaaggcacacctgctgaatggccaatagctaggcaggacttctgggcagagacaggaactcaggcagagactggtaagcgggaggtgctggggatgtgaagcagggatgggaacgaaacacagcatggaggagaggtaacaagactgcagagcaacataaatggttagttaagttatgagagctagttgggaacaagcctcaagtaaggcctagctttcagaattaattagtgagtctttgggtcattactggggagctggtgcacttcacttgctgacaggcctgatcatctaaatttgatccccagaacctataaggggaagacattgattctttttcccgggcttacacttagctttcattagaaaatgaaaactttatagtcttctatgaagaaggctggtttatacaggcaagtttttcataactctgttcaaacatgaatcaatgcagtgacctcaaagaaaggattccaaagtttaaagtgattggcagagcctatttcaactgttcttactggtctcactatgtagctgtggctgtcctggaactcactatgtagaccaggctggcctcaaactcacacagatctgcctgcttgcttctgcaggaattaaaagcttgcaccaccagagttggcaactgtttttactgaatgtaaaacagtgacaaaggaagtgaaatttggcaacagcttcatgtataaacacaatggctctgtacaaacacacatactaggacaggatgaaagctctggtagataatttgacttgcatctttcaagtttacttagaggaaatattttactcaagagtaaaaatgaatcttagggctggtaagatagctcagcagggaaaggcacagatgccaagcctaacaacctgagtttgattcctggaacctacatgatgaaagggataaaataatcttagatgtcaccaggctaaatctagattcactcattacctgccaaatgtaaaggtgtagaatgtcgaccttgggtatcacggcaatttacattatcaggagaagacaatttcttcactctggctaaacaacccttcttggcagcatctagcaaagctgcatcacctctaagtagatcttggatatctgtgtctccatctttaacaaggtccagaggagtattaccatctcggtttttctttgtagggtctgcaccatgctaggcatgagggaaaaaaaaaggcgggggatattagtgggtattttgtcattgagaaaataaccagagcaaagaaaataatctcatattaactcacctgattgtcattactgtttaaataccataggcagctataacacattcgtaagtatgcatcaaagaacagaaaaactatagtaagttttcagctatataattatcattttagatagtcttatgcagcacacaggctggtcttctgaaacttattctgtagttgaagctggccttgaccactgatcttcctgcctctttcttcctacataattagaatgtaagtatgtactactaagtctgtccatgtggtgctgggaataaatcccagggccttgtaaacgctagccaggttctaccaactgagatattatatccatagtccttacattataattttatggaaccactgccaaaaatgtagcccatcattgactgaattgtcacacattgcatagttgcatttttccttttttggagacacagtttctctgtgtaacagccctggctgtcctagaactcattctggagaccaagctggccttgaactcacagagaaccacctgcctgtacctcctgagtgctgaggtatttttctgttttttaaaaacaggatctcaactatgcagccttggctacctttctggaaatacacttttgaggaccaggctggccttgaactcataaaaactcacctgcctctaactcccaggtgctgggttttaaggagtgcaccaatatacctagctgcatctttccttttttttttttttttttttttttttaaatttttggttttttggtttgtttgagacaggtgtctctgtgtagctttgaagcctatcctggcactcactctgtagtccaggctggcctcgaactcacagagatctgcctgcctctgcctcccgagtactgggattaaaggcgtgctaccaccaactcccagcttttctttaaaaaaaaaaaaaaataataataataatactattattattatttattttgtgtgcattggtattttgtctgcatatgtctgtgcgaggctgttggatcctggagttacagacagttgtgacctgccatgtgggtgctgggaattgaacccaggtcctatggaagaacagccagtattcttaactgctgagccatctctccagcccgcatctttcctttttacaaacactgtatgaatgaatctatgctgtaatattttacagcaaaatatctgtatctatattagaccagcaccatcaattttatagactgttaaaacaaattgtttttataaaccacacaatgagtcaagtaatttgaagttagatcaccaaacgggaaatgatagcaccagaacaaccatacagtaggtggctatatatatataaaaacaaaacaaaaaaaacccctatgctggtaatatatacatagactcaaaaaataaactgctcatgacattttcctttgaaatttttaagcattaggtaactttcctccctactttcattagtttaagttttatattagtgttactagaaaaataacctgagtattttaggtaattaacactgttcatagcaagtacttaaagtatacctggagcagaagtttgcatatttcatattttccttttgcagcggcttcatgtaaaggtgtgaacttccacaagtcagctacgttaactactgctccatgcttgacaagaagttctgcaacctcatagtgtccataagaacatgcattgtgcaagggcacgaggcctctgaaaagttaaataagcagtaatggtggaaaacatgttttaatctcagtaattacatataaccattgaaagacatttcttgaactgcctaaggggatatactagttatactctgaagaacttaaacctatggaaagcaggaaaagactttttgggggaagaatttcaacaaccttaaatgcaggggattataagaaacattcacattcagactcgacatctaacattgtgtatttttaacaaaaaacaatttgaagattaacaaaagaatttcaaatatcctcatgaacactaaagactttactacattaatatcagtatcaaaatcacaaaaatgaaatctctggcaattataaaataaaaagacattatacaagttaattttaatgtaaatttgagccatttacattttgatttttgaaagaaagggtttcatactgtagtccatatcagtctcaacttttccagtgcttggagtcaggtgtgcaccactatgcttagcataaagccttagtaagttatcattgtaccaatgctagaaaacaaattacatgtcataaaacagaagtattttatcatttatgaggaaagtcttttgcactttgccgattgtttcttaccctttatctttagcatgcacatcagctccatgctgcagcagatattccaccacagacactctgttgtatccagctgcaaaatggagtggtgttgactgacgtccttctatgtctctacagttgacactctgaacagtacacagtttctgtaggaataaacacagcacgtgccttgttttaacgcagtttaacagaaatttcaaatgcttgctttattttcttacttcattaaataagttatttcaaaaactatccttatttcagcttctcatttactgaaaattcttctggtcctctcatgtatgcttatatcttctatttttttgaaagtgagtaaaatttactatttacatattgatatgataacttcaaagaatctcattgtaacttccatttggtcgtaaacacatgtaacagcacactagatcacagcagcagcgagagtttaaactcaaaagtcccaaatctgtatctacagtcagaatctgcattttaagccaggcaaggtagtatatgcctatcatcccagtattggaagacaaaggcaggaggattatgagttcaaagccagcctggactccatggcaagactttctaacaaacaataaataaaaaccacacagcaaacgtacattttagtaagacctttatctacaagtacattaaagtctgagaagtgattctgcagaccagtggttctcaattttgacacacacactggtcttatttccaaattttccaagtcagtgtctggagttgtaaatttgcattcctaccaagtttctaggcaatctagtagccaaggaaccagatttaagataatgactctttctgcactatatatctatatctatctatctatttatctaacaaaatgctgctggttatgtaacatccttggaggactaacaaaataattagaaaattattttcctgtggttcagataagtatagctcaattaaaagtaataccccaaacattcctgaatattatgcatagaatttaggggaataaaacagacaacagatcacaatgcttaaagagtcacaagaatatcgggattagtgcgacacattatactacttctaccttaagaacagagataactgggggctgaagagatggctcagacgtaaagagcactgactgctcttccagaggtcctgagttcaattcccagcaaccacacggtggctcacagccatctgttatgagatctggtgccctcttctggtgtgcagatatacatggaagcagaatgttgtatacataataaataaataaaatcttaaaaaaaaataaaaaaaaaaagaacagagataactgaagttcataggctctatcagtggtttatccaaaagggagccactgaactggtaaagtttttctgagcttatgagacatacttgctggatttgatgaatgaggctccagtcccaaagcagtgctttaatgggtatgaaacatgatctagggatgagtgtttccactgtgaaccagatattaccacatgtggtagctaccaaagatcattttaacattgttcactctgctgttaggtactgttacagttaataaagccaggttgctgacttccaagcaatcacttagaagataagcctctgggcacacctgccagggatcatttattaatcaaggcaagaaaacccactttaactgtagatgacaccattctatggactgtgttctgaactgaataaaaaggagaaaaacgagctaaaagtcagcactcactgatctctgcctcctaactgcagatacaatgtgaccagctaccccaagctcctgctgccatgctggactgtaccctgtaagcccaaataaaccttcctttctcaggttgtttttgtgaggtgttataggtatccagaaaatgatgtaacctgatagacaatagtaaataaatctaagtaaaaatgtaaataattaaaggatagtatggagaacattcctatccaagttaatttatacaagtcacatgccctaagagaaaagaaacagaaaggctgatggagatgaatttccaagagattttagagtcagagggcaaggaaactagcccaatgcttatcccagagagaaacaggtgtctactttaatccaatggcattactttgttttctaagtttcatttctattttaaattcatgtcttctccctctaagctccttctattcctctgaaaagaaagtttacactttttaaaaaacaaaaaacctaaactaagatcaaaactactaccaccaccaccaagaaagaattagccaagctggtctcaaacttgatcccctactcagcctcccaaggactgggatcttgggagtatgccaccacttctggtagtgtttagtttcatgcttattaaatactttcatggtctataagtaaattaacatctaaaatccatcaatctcctcactcatatacatattcaaataaaatcatgtagttttaacttgaataatcaccttgaatttaataaaacacaatcacctgacgcatgaaaaacaaatcagaaagccactttgcatatgatgtctctgttcacaatggcacagcagaaagagatcatgtgtactcttagagaaaattaaaaaataaattcagggctggcaacatagctctgctggtacagctgtagtgcaaggctggagacctgagtgtgatcactggaacctcagtaaaggtggaggagagaaaatactgcctccctaccccacaatacttaacccatttaaaagatcagtgaagagttccagaatgaggccaacatttgttaagtcttgtttgttgttgttgagacagggcctcaccgtgtaaccctgacaggtcttttgaccttaacgagattcacctccctgtcaccctagtgctgggattaaaggcaagtgcttgtatatcttaaaaaacaaaacaaacaaacaaaaaacccaataactatataaatctatagaaaatctactatgtagaaattcaacaaaattatttctaacagctgcttctgccacgaattaagcaatataaaacttgtttttgtttttcgagacaaggtttctctgtgtagccctggactatcctagaactcagagatcggcgttccttgagtgctgggattaaaggcatgcaccatcaccacccagctatataaaacttattactgtatacaagtgctctctcaacttgtagtagcttagttttgaaaaagtctttaaggagagaaaaaaaaaaaaaaaaaaaaaaaaggcctttctccctggctaattttgaaaaactgaaacattattccattattgaagaattatttacttcatgaaacaaattagtcacattctgacttatattacttgaatttaagtttgctctttcaaaacctcaggttttgggttatttacctagacacacatttctatatctaacaggaacacacaacacgggcagtaagacagcaatgtgaatggcacaagtcaaaacagaatctgaggaaagatgactctggggagactgctgccagaattggacagacaagcaatctggtgctctgtaggagaaaagaaatgttcagtccagctgagtaacagactgaatgtccctgagcagcatcaggactatgctcacacagtgacagtggatccacaggcagaggggggtaaaggaatgaatgaatgaaccagaggaaactatacattcacctgcacctggttcctatgttttatatgtcatatataacagtaattgatatcaacataaatcttccttctttttcttgtattgcttttagaaagggtcttcctaagtagctcagggagtcttttaacctgcaatcctcctatctagacatctctactatttggattgtgcactatcatacctggttcatacttattaattttaaaattaattttaactttaaaattaattttaaataaaaatactattttatattaacaaatgctttgcctacatgtaagcctgcactccacatgtgtgccggtgcatatggaggtcagaagagggtgttacattcctggaaccagttacagatgattttaagccaccatctggatgctgggacccgaatgcagggcctttgcaagagctgcaaatgcttctaactgctgaactgtttctccagcctcttactcttttatagggacaagcgagttctttaaaacaattgcactttatacaagaagagcactaatatttgtgaatgtgacattttctatgctgcatgtgaaactaaagtcccacccccatttctcagtgttccttattgcagaggaattggtattttgtccttttaataaggctatttgacataacagtacagatttactaaacaatgacacaataaaaatcaaagaacaacaaattttaagattgtatcttacctttacagtctctacatcaccagcctttgcagcttcaagcaactgtctatctgcctctgagtgacctggtgagatgccctctaggaatagggaaaaagagtgtttaatttccatgtagaaaataagcttcaagggagttatattttacaaaagtagcttttgagtttgctagcttatatagtttcaccacaggggaaagaaaacactaaggatattaaaatttttgaaaataatttgtcaggcgtcagtggcgcatgcctttaatcccagcacttgggaggcagaggcaggtgagttccaggacagtcaggaccgttacacagagaaactctgtcttgaaaaagcaaaaacaaacaaacaaacaaaaaaattaaaattgtgtctcaaaatttctgaaaagaatatgtacaacaaaggaagttccaggtaaaggttgaagcttaaaaattaaaccttaaaagaactaaaagaaaacagagataaatgtttatgtcttagataaacatccagaacaatatgtcaaaggaaaagccaaacaaaaaaccaatgtggaaaagtgccagggacaagatggaaagcctcacattataacatacattatcagaagatgtatacatattttacatacccaagatctaaaaaaggaacgaagcagtcccagtgcatatggaagttatcaccagggttgctgtagaaaaaaaaaaaagccaacctatcttttttaatgttgtccttactctaaacccagcaatcatcacatcttatttgattaataagagcttttaaagcccctttttttggtatgggggggtatctcattatgtacctaaggaagcactgaacttatgactcttctgcctctacctctccaaagctggtattaacagtgcctcaagaaaagagaagccgagcgttggtggcgcacgcctttaatcccagccctcgggaggcagaggcaggcggatctctgtgagttcgaggccatcctggtctacaaaagctagttctaggacagcctccaaagccacaaagccacagagaaaccctgtctcaaaaaaccaaaaaaaaaaaaaaaaagaaagaaagagaagaaaccaggcgttggtggcacacacctttaatcccagcacttggaaggaggaggcaggtagatctctgtgagttcgaggccagcctggtctccagagtgagtgccaggataggctccaaagctacacagagaaaccctgtctcgaaaaaccaatgaaacaaacaaacaaccccccaaaaccaaacaaacaaaaaaacaaaagagcagagagaaaaagaaagaaaaaccatcatatgggcctacctctgcatcctgaatactggaattaaaggggtgcatcaccatacctggcaaatcaactttataaactttaaaacctgagtgtcctgtattttctcagaaaaactgggtagaatatgatactgaacaaaagttgtaattataatttaatgacatttaagaattttaagttaagaagaccaaaatttctcaaaaattttgtttattaccaactcctacacctaacacctgatatgtggaaaaccttaaaggttaatccctaaaaaagaatgtcagagaagcacccaataccttgaagcagctgctgcacattttcatttcccatctgcaaggcggtgaaaccctggagggatatgatgttgggatcacacccatagctcaggagcaggcggcaggtctgcaggtgaccacagtgtgcagctctgtgtaatgatgtctgtccaagactgtccaaagcattaaccttaataattcagaaaacactggaattagcattgcggcacaccatctaaaatcatccaatttatacttagttcttactactaaaagtttcttttttttttttttttttttaagaaaccaattgtccagtgccaaagtaggcattcctacacccccctccaatactagagaacaaattcaccaatccatgaaaactgatgtcagaatcaagtcccaactttaggttaaatatgtgggttgccaagtacagtaaattaaacatttatgtttagctttaaagcatttatgtatttaccctatttagaactagatattgatggaaattgtaattttatgagtctttgagatacataatttttatgattgactccaagatatgcaacagccaggaacaagtagagatgagttagtattggaatactcattcttatttaatctatcttctacaccatgttaccatgtagaataaatattatgtgaatatatccacaatggaacactgactagcaatacaaaggtattgttgacatgctgatcaatctccaaaaacatactacatagaaaaacttcacactaaagcgtacatgtttgtgatagataaacctcaaaaaggcagagactgcttgagacgaggcactattatggattgaattcagggccttacacattgagacaatctaccattgagctatctactacccacttctgccttagcctatgttctttaatagatcttggttgcagatatattgtatatgtatatatgcatacatatgtgtatatatatatttgttaaaattcaccaaatatacactgatttgcacatttcaccccatatggattttgtaactatagaaaaactatatataaacacccaactctagttgatgtgtatacatgaagtacttagtatgtgcacaataatctgcaaatgtgtcaaaaaatacatgttggtagatatgtaacataatatagctggtgatagtatccaggtacggaactattttttgtctttgaaactctttacaagaaaataacattacctctaaggtcacctcatttccattctggctctttaccatgaaaataatatacaactaatgaatcctttgtccaccagtgttttttgacactggccaattaataattcatgctatcagagaatatttgaagatggacacagtgagatctcataaaactagaatatgaatgtctatgattacagaactgaaaacctatttaaaatgttcagggcaacatttactcacatactaaaccatattttttgaaaaacatttcctgaaagctttgaatgatatatattagggtgaccaacttttgctggtttgcctgggacttcctcagtcttcacattataatatgggttttagaaactaccaagttctggataaaagcaaatgagtggtctctagtcacaactgtctcactaagcttcacggctcaaattcaatgtgcgcctgtatactcttcaagtaatgtgccatatgtacagaaaaagtcatcaacaagaaggcacagagcagagacaaatgaggatgacaagcagtcaagcagaaacgaactttattttattcagtaatttacagtaggaaagaatcatgttcatacattatcaagaacttcccgaaaccagagattaggacattaaaggttaacagaaaaagaaaccaaaggaaaagaagaaaatgacctgaaggtctcagggcctacccccagctccatttctgtaccacagactaaattttcactaacaattttctttgaagaatgtaaaacctttggagtaaaaactggaaaccatcaactgtcatttctgatatgtacaccttttaccaagcattttttttttaggttgaaaatttgaaattagtgtgcgtgcgtgcgtgcgtgcgtgcgtgcgtgcgtgcgtgtgtgtgtgtgtgtgtgtgtgcgtgtaagcatggggaacatctctggactcagttctcaccttctaccatgctaaggcagggtctttttactgtttctcccactttgctactggctgctgaactggtcaccttccctgtctgttcctggtctataagaacattgagattacagatgtgttccaccacacctgcttttcacatggattccaagagatctaagtcaggtagttaggcttgaataacaagcactttatacactaagccatttctctggactcactgctaattatattttgaagttattgggtaagaaaatgatttacagctttgttggaagtagctattcaagaggtaaaatgctttgtgtataaatgccaactaaagaatgttaatttatcaacatggttactatgttgttttaagtcaaagtatctctttacttctattcaagttctttgtcttagttacagaaatggcggaaagtgcaaactctaaactggttaaaaaagaggagttaccatattaacaaaggaatttcaaatgtgggtcagaaaagaaaatcagggtaggacttttaagacaagaggtgttctgtgtactgttaagaaaagtcaagaataactttgatcagcaaattaaaaggaatgaagaaaaaaaggacatacaggaataatgtacatacaaataagataaataatttgggaaagttgtctataggacccccatctctctgcatattgaggggtgtgcatgtgtacaggtgcatgagtgcttgacggtcaagagtacagccttggaggctgggcgttggtggcacacgcctttaatcccagcactcgggaggcagaggcaggcggatctctgtgagttcgaggccagcctggtctccagagtgagggccaggataggttccaaagctacacagagaaaccctgcctcgaaaaaccaaagagtacagccttgggtgtggctcctcaccctctatcttgtttgtacagactgggtactcgcatgccaggctagctggcctgtgagcattcaggtactctttcttttctgcctcccatttagccacaggagcactacacctcctgtttcatgggtcctaacaaattgcacggcaagtactttacttcccagactggggctgttttgaattgtaaactaagagaaaaaaacatttatgatagattgagtagttaaaggagccagatatctactaaacagaaagtaactcactggattaccaaagattaccagaaatgatgtatacctttgcttcatgcttcaccactacttcaacaacgtcattgtgagctttttcagaagccacgtgcagaggagtcaagaatcttaaaaagaaaaggccagccacaataaatgtattttccatacaaacagattatctataacatctactagtcaaaggtatacttactctttagtcttttcgttggtgtttgctccctttcttagcagcagttcacatatttgctttcttttgggatatggggatgcagcagcacaatgctaaataattcaaattgcagcattaatcaaggactgtacagaatcagttccacttaagaacacttgtgtctccaatcaagggtaataaatgtaatctcatttctttgttttatttttctcggattttgctcttgaaagactttctattggagtgaatgtgtagtaattgcagattctgacatggccggaaaatctcacagatcaaatattatgtgttattaaatatcctgattaaactttgtcctcagtttctgaaaatgccactactgataggatgaaaatgttgtatgtaaaaggttaagactcaaatgttggtatttcttcttgtagtgctaaataccgaattcacagcttcacagatggtagcccagctttaacactgggttatagttactcagctcagggtttgggttgttacatgaagaaaacgtatacatttttttgttctgaattctgctggtttaacagcactgatgagctagctgctaagttgactgtcttccttaactagttgccacagcagaataaagagcttgaatttcttgttttcacaacctgtattgtttatggctgcagcatttctgagtatcacagaacgaaagagagaggtggcagagatttgccttttataaacttatcatctaggattatgacacaaatctttacaattttactagagtataacaggtactcaatatctgaccaaattgaccaattcaatgtgagtatttgttaaaatccaaatctgaaaattgtgggctaaaaattctggttaaaattttaaagcaaaacgctctatgcatctaagcatacagtgattatgaaatctgttcttctgctactttttaagagatttatttattgtatgtatctgagtgctctatcggcatatacatctttatgccatcggagggcatcagattccactaaaaatggttgtgagccaccatgtggatgctgggaattgaacttaggaccactggaagagcagccagtgctctcaacctatgagccatctctccagcccttattctcctgttattaatcagttcctcacaatttgctacagtcaccaaaataattccctcaccctcaataaagtcaagtctaacccgtacacagttcttttgacacaatatgagtaacgccctaggacatttattctgaattttaaaaaaaaatggagatagtttatttccaagaagttttattacacccaccacaaattagaggcctattcctctgtccatcctaggcaagagcctgcaaacaagaagaaactgcccctgcagcacaactactcatgaacacttaagtcctagagcgttttaaggttaaagacacgacacttacagcagtatacttaggcgaaaaatacacatagtacaacattcttatctgtgctgttttgctttcattacctgagatcactatgctctgatatcacagaaaagctcctggaataaacatgcttctgagaagtgtgatgaaagcctgtcctttgcactgggacgtgaagcatatctttgttcagagtatacaggctgcatatactgcatactcgttagtaactttcgcaactgtctgttttctttggctcaactgaagcgtatcagtgtttgtgttcaagaaatgcttattgtacttaatatctctaaagtgttatagaataataccaaactcacaaaaccaaaacaacaaaaaaaccccaaccagacaaccaacaaacagatgagtatgttagaaacaatgccatcactagaatcacacattatgcttagtttttggttattttattttaaaagcttaagcatgaaacgttaccaatgctgtttcgtgtgtttgaggatgtttgaaattcaccatttccagagaaagatgttttttgattcttgtcacatcagcttcccgtgcagcctgcagcaatgagtggcctttgaattcatctaaacaaagaagcatttgcatctacatgaaaatgatcatagtaatgaggcttgcctcacacaatactagtattttcttttctttttttttttttggagttattttcaaaataatctccaaaatagccagattaaggctccatagataagactaataccaacaattagcaacagacacaatggcattctgggtttcattagtcatggctcaattcattcaatccatggtctgttgatattatataattggattagagatatctacatgattacaatctattcccaccccagagttttctgagaccttacaaagggtgaccataacccctagtcttgtttatgcctatcaggtaggtaactatggatcaaacacattggctcatcaattgctcctcaggatgaacaaaattaaagaaagcatttcctcaaatgttctcttttaattattagatttgtgagatcactcatatcattttactgttgtggaacaatgtaagtttagttcatgctgctcatttatgcataggaatacggtatctgaatttcttactgtattttctttagctacacagaaaaccacagaatttggcccaggtagtaaagaatattatatgtcacaacccagggactgtatttacaagacaacaaacaacttttttgtaaaattaactacaaagtcccaaagatatagtaaaatccaaaggctataattcatagttttaaattgaaaagctagcccaaatatatttttacacagtatttaaactatgagctatgctaaacaggaacaggtacccaccaataaagaaaatattttactatttaaacatccttccccaccccccaaaaaaaggtcactcatagaagtcatgtatcttcactaagtgtcacactgcttttttgttttttgttttttttttctttcaagacagggtctcactgtgtagccctgactagcatggactttctacatctataccaggctgcagttgaactaaaaagctccacctacatctgcttcctaagtgctgggattaaaggcacgtgccaccacacccatcttgaacatcatttttatacttacatgataatctttccttcaattgtggtgtaggagccaagtctatagcacttttattgtgacaattcagcagtgttggatctgccccataactcaggaggagagaacacacttcaaccctattcttagaagctgcctcatgaagaggagtaaattgccacaagtccattgcatttacacaggcaccatgctggggaagaaaagatgtagagttaatgctcaattcttaagagaatctagattaaccctgggtagtttaacaacatgcaagttgaaaaaaaaagttttctgcaggtataatttacaaaagggaagcacaactcttaatgagtgtagcttagtgaattttgacagatacagaaaaaagattcatactcttctggattttcgagacagggtttctctgtgtagccctgactgtcctggaactctctctgtagactaggctagctgaaaactcagagagatccgcctgctactgcctcccgagtgctgagattaaaggcgtgcaccaccaccaccaccaaataccaaatattttctatgcgtctttcattggcaatttttgccccccctttttagtacatttatgtgttcctggatttcataaaaatgaaacaagtagattgtccatgtttagttctttcacaattaattttcctgagactcgggctgtatcatcagtttggattgctgaggagcttttcattatactgtgatttacttagcctgctactgggcaattggactgtttctaggagagggaataacaatgaggcaacagggaggaggaggagccagaaataacaagattcctaaatgcagtttgcctctttgacactatactttcattagcacagaattaaggtaagtagtcttttaaatagccaacaacacatacttgggaaacttaaaagctctactttttcggggggagggagcattttttttgttttttaggattttagtcatgtgcatctgcatgtatctgtgtgtgcgtatgtgcatccatgaaggcctccagagtccagaagaggcagtcagatctcctggagctggagttaacagaatggtggaggtacacaatatgggtgctaggatccaaactctggtcctctgcaagactgtgtatgctcttaaccccaagcacctctctagcacccaaactcttttgttttctgagacagggtttctctgtattgctttggagcctgtcctggaactcgttctatataccaggctggcagcaaactcagagatccacctgcctctatctcctaatttttttaatagtcaaaactttactgtaaataattgtaaattttttataagtattcaatgaaagtagccaaactcaaagccatacagtcttaatgaatgggtacagctagagtactcatcctttacaatggacttcactttcaattatatttttatatacttaactacccctccacacacatgaagaaaaataaatgaaaggtttaaaaccagaaaaaaaattagctttatatcccctaattgtgtatcaagtcaacattaaaacctggatcacaataaagttacacacagaaccttcagtcagtatattagtttttgacattccctttcaagagaagaatagcagtcaactcttagcacagctgtttaggtacaaatctgatagaatttcccctcagaccagactacgtgcttccttgcacttacaggctatgaagatcaaagttgagaaaataccttgctattcttaaaaaaaaaaaaaaaaaagtatttgtgatactttgatacagggtctcactatgtatacctggctggcttggaactcattatgtagaccaggctggcctcaaactcatagaagatccacctgcctctgcttccagagtgctgggattaaaggcaagtaccaaccttgttattctttaaaacattttttaaaagtacagttaccgtcgaattaaactgttgtgcatgcacattcaggtcagaagagaacttgaaggaactggttttctcctatgatctgaggccatcaggcctggcagcaaggggctttatccactaagacatcttgctagccctccttgctatgtttgtgtttgctggtgccatactttattatttaacttagggatgtgacttagcacctctgttcctaggtaccgtgagtgttctggtgatggaatgcaatcactgaatgaatgtcttcagttagcaagactcttcagcaagggctgtcagcctggtatctgcgcaggacctcttaccttattcgataacacttgaggatgacctctttagtgctacttcatatttaacattgcatgagggcagtcaaatgctagcctatcaataatctgcatgttattataattattcccactttctaccaagcacaaggaacaaaaaataagccagaaaacacaatgcatttaaaatcattttatgtaattatagaaaataataaggcacaaaagaactaaccttgaccagaagttcagttacttcataatgaccataagaacaggcattgtgtaatggtaccagatcactacgggagagtgaggaaaaaaagcctattattacagagttcttaagtctaaggcaatcttcaaactgcaattccggagtctctctttcaaatccatattccctttctctctatcattattactggttactagtctgggcttacactgttacaaattctgcatttatgaaacaatctcttaaaccaatttattctcgaagctctcgccagagttttataaaggtaaatcccttataagcattcttgtcttaatatcattgttcttccttgctttgaagagatggttctaactttatactttttccacagatgaggtctcactatgcagctttggctggcctgaaactcactatgtagaccagtctggtcttgaattcacagacacccacctgcaatctttagagactgccctggcacttgctcaatagaccaggctagccttagaactcacagattcgcctgcctctgtctctcaagtgctggattaaaggtgtgcaccaccactgcccggcctgaaacatcttaattcagtaaggtaattgctatagtcctcagtaaactgaagccaattttttttattaggtaatggaataactcccacttctggcttctacctttaagctgcttcctctccttggggatcaccatcattaacttgtacaagcactgccagagcagtttctggtgacacacagctctttccttgcctgaataccaattttactgccactcacgaaatacttctgcttcaatttccatattctcataaaatcaagacttctaaaagttagcacaatgttttctgccaaactatttcccttctatccttcagtatgtgtgctgtgggtctaactcacacagtttcaaaatatgaaagttttctctattcctttctctcttgcttcacacccaaatcttcactatctctacttttccactgcactatctgtctctgccttccttttcatttcccctgcaactactgctagatcttagatgcacagacgctctccagagctcactcttagatactgtgcttcttacttctagtctcctccttccccaattaatccaacatgtattattctacaatgcaactcttccttaagtttctttgaggataaaataacaacagctcttcatttcagatcacaaaatgcattaagactgcaaaacaaaattgagttatgctaatacatcaaaaattctgtaacttttattattatttttttaaacccatttctacaattctgtatttgtctcatgtgaatcatcatcatcagctttatccaagttagttttgggtgtgtgtgtgtgtgtgtgtgtgtgtgtgtgtgtgtgtgtgtgtgtgtgtgtgtgtgtgtgtgtgtgtgtgtgtgtgtgtgagtggtgattgaacccaggcctttgtgcatgctaaaacaagatcaacttgtgatctttcttcttcatcctcccaaggattataaacctgtgtcaaagttggcttggttactacttcttaaatgtactagctacattttcctatagaatcatgtcccctaaactcttgctttctagtcgtttactcatttttgagtctaggttccatatagcttaggctagcccagaacactatgtagttgaagatgcccttgaactcctgagtcttccaagttatagaattatggcatatggtatcacaccctgccctgaacttctgctttcttgaagtgaatactgacttgaagatatgagtggagcatacatctcctaaaggattttctagtaactccatccatcaatctctacttactactcaaatttatcaggcatttttcacgtaccataaattgtattgtatgagtggtaggcttaatgtcttataatccctatggtgctcagaatagcctgcatcttacaaaagctcaaaaacacaaacaaacagcaagaggaacatgctttcaataaggaaatagtatgttacaaggacggaacaagacggcccccttttattcaaagcttaccctttatctttagcatggacatcagctccatgttgcagtaacagttgtacaatctttactctgttgtatcctgctgccaaatgcaatggagttgactggaatagtaaccaaataaactaatgaaattcataaaatggctgcataacaagtctgaaacataaaaaactatgacttcactgctaataaactatcaatttggttttataaaattaacaatatataggaagcatagcataaaagttcggggctggagagatggctcagaggttaagagcactgactttttccagaggtcctgagttcaattcccagcaaccacacagtggctcacaaccatctgtaatgggatctggtgccctcttctggcctgcactgtatacatgataaataaataaataaatcttaaaaaaaaaaaaaaaaaactttagccggacgttggtggcacatgcctttaatcccagcactggggaggcagaggcaggcagatctctgtgcatttgaggccagcctggtctacaaaagctagttctaggacaggctccaaagctacacagagaaaccctgtctctaaaaaccaaaaaagtttaaagttcactactgcatacagagataaatgtttattatcagtgagttttattaagtttaagaatcttaattactattaaaaaagaaaataccagaactctctttaaaagttttaacttataataaatatacatttccaccatcagatgacaaaaaaaaaaaaaaaaaaaaaaaaaaaaaaaaccaacataaaaccaagtacctttctgccatcacttgcatggcagttgacattcaatggtgtaagcagagccatcattttttcctcattgccactcctagaaacacacaaaaaaatgtatcagtagcttatactattatatattgtgatcattaaaacaaagtcttctcttaaagcatgtttatggcattaaaaaacaactctttttagatgaggtctattacattctgtagcacaggttgtcctggaactttatgtagcttgagctatcctgaactcaaaataggcttactgactgtgcctcccatggatggaggttacaatatgggccactactacatttggggattgggagtgaacaaccagagattcacagtgaaatatgttttctttttaaatatctcatctttattctttttaaatgtgtttgtgtgtgtgcatatacgtatacatacactcttgtgtgtgtgtgtgtgtgtgctgcccacagaggtcagaggcaccagatggtcctggagctgaagtttagggtagttctaagccctctgacatgggtaccagaaactgaacctgggtcctttgtaagagagcatcaagtgctcctaatcactgagtcatttctccatcccctaatagagatctacctgcctttgcctccagaatgctgggattaaaggtgtgcaccaccaagtctatcaagaatttcctttttaaagatttatttttagttttgcagtggtggcgcacacctttgatgccagcacttaggaggcagaggcaggtggatctctatgagtttgaggccagcctggtcagctagggctacacagagaaactgtctggagcccaaggaggtcaggagtgtgtataggaacctctggaactagagtttcagatgtttttgagctgtcatgtgagtgctgggacttgaacctggatcctctgcaaaagtatcaagtgcccctaatcactgagccatctttccatcccctcactgtgaagtttccatggtacacatatgtaagagtagcacatacctggcactttccaatagttcatctttcttatagtcacctgtgaatggggggggagttaggagggtaaggagaaagatgagaaattaaaacaattcagggatagttttatgcataaagatttaaagtagatcaaactagaaataaactcctaaggatagataagaacccagtaaacatggctggaggaacagctcagtggttaagaatgcttacagctcttgtaggactcagatttggtcccaagtacctggtatatagcagctcacaaccatctatagccagagttccaggggttctgatacctgttctaatctctttaagcattgcacatccatggtgctctctctgccacacatacacacacaattaaataaatatttataaaaagaatccaataaataatggcagttacttgaatggacagcatactagataaaggccaaaaacatgaagtagatacagttccaaccaagcctgctagcttaaactagagctgtattcatgtccacagaagccacactcatggtattgaaatgtgtcccaaatcctgacctgaaattaacttgaagaaaattgtgctttttgaaaggattcctttaaaaaaaaaatcattacactgaaaatataaagttgcacattaattgtctgaaaagcttggggatattttaaaaatatactgaatacctgaagcaacacatgtgtatcacaacctgccgccaaaacaatgacaaatttaaacataaatttgaaaagaaaaaagctttatttttagaatttagaatcaaattaaactgttgataaacagaaaaatagcaagtgagctacacagtccacaaattctacttgaggtcattcattaactgcacgaggcagtccatctacctagcccattaagtgtttttattcttcctggaataaacaacgtgcacagacttaccagtgagaacagctttggcggatgggtctgctaaatccaatgctgtcctgccatctgtatttctgatggttggctcggctccatgctgtaaaagtactgcaaaaaatagcaacactacctttcaaaactgtgatcatgacaatctgagttaatgaatcagtttcttaatacttctggtacagagaacaatgagctgtttcagtggataaaggcatttgctgtgcaaacttctcaatccgagttcaaactctagtatctatctaaaggtggaatgagagaaacaactccacagggttctctgacttccacacatatcctggcatacatgccctacacatctcatagacacatacagtaataataataataaaataaatttaaaataaaagtcccagtacagaattctcaaaattatttaaagactttttgtataccaataatacaataaatgtttaaatttaagaaaacgtaacattcaattatttaatacacaaagcatgtaaagctttctcacaatgtaaacttttttttggctggtgacaggtgatgaacgataagaagtatgcagtggtaaaagggaaaggtggcttgaaagcttttcttgttgcaaaggagcacgatctatgttagaaagactcttctatcatgaaatgcctaaagttgtacatagaacaggcagagccacaggacttaaaacctatgtgaacacaagcatgcatttgtgtgcacttgcacacacagaagcaaaaaataagttttttgaagactgcaaaggtcaaggctgatctgggcaagttattgagcagtgcctatataattacaacaagaccctcaaaccacaaccagagttcttcgtaagtccctttctgttttcctaacatttctccaatacaaggacgccagaaagttgagccttgagaccttattctggctaattgttccagttagatttttgttactgggataaaactgtgaccaaaagaaacttggggaagaaaggatttatttgtcttacaggtacactctatcatcaagagaagctgaggcaggaacctatgggcaggacctgaagcagaggcaatggaggaacactgcttattttcttgcttagctacttttcttacatagttcaggctcacctgcctaggaaggcactgcccacagtgggctgagtccacgtacatcccattaagaactaagaaaatggccacaggtcaatctaatggaagaaatcctcgattgagttcagtcttgccaggtgtctctacttggtgtctaggtgacgaaacctaaccagcatactaacttatgccattaggcactatcctctaatactcaatgttcatttctaccatgtctttgtttcttttgttttgtttgaattttagagatagggtttctctgtgtatctctggccatcctggaactttctctgtagaccagactggcactgaactcagagatccacctgcctctgcctcttgagtgctgggactaaaagccaccatacttggctgccttttatttggttctttatgcatcttatttctcaaaagaatataagtttctagagaatgatttttttttctatttcccagagaactttaagattttaagaaaagacattcaataaagaataggtagattgagagggctggagaaaaaaaggttagactaaatcataaacagacttaaatgtaaattcagcctggtagaaagacaaaactaacatactagattcagaatagttagaatttgtagaaaactctgaaaaagaaatacaggcttaccaatgcaaacatcgatttttcctttaattgcagcttcatggagaggggtataattccaattatctcgagcatttgggtctgcaccatgttgcaaaaggagattgactacttcggcatgaccaaaagagcatgcattatgaagaggaataaggcccccatcatcacgtgcttgcacatttgcaccgttctgaagcagatactcaactacatccttccgtccaaaacctggaaagaaaataaattgcccacatttaaatttaccaaggaaaatgataagccatgctaaaaatttttaggatgaaaaataacaagactaacaattcaagaactgttgtacgtagaccaggcagagagccataggagttaaaacctatgtgaacacaagcatgaatttgtgtgcacttgcacacacagaagcaaaaaataaaagttttttgaagactgcaaaggtcaaggctgatctggacctgaacagtgcctatatagttacaagaccctcaaaccacaacagagtctctccctctgctaagtagcccataacaccttagtggtaaagagccttagctgctgctgctactaacttcagtgatgatgggggggggggggagacacgacaaaactcaaaccgtaaatgattccaactacataatgacatttctaattataaataccaagttctgcatatttagtgtgcacacattttcagacactccatgaatgtagctaaagtatgtaaatgagtacctataaagaagtgatggcttgaaagtcttacagaatccctctctgctccagtgggggccatgaggcaacaacaaaatgagactagcttacagaggtgagatgtatgtctttattttgctattgcacaacacaagcaacatctaggtaggggtccttctttttataggtgccagtctgctcaagcacagccaaaccaagtgaagcaaaaagtttgctgtcttagttagctttttttttttttccttcttcttccttctccttctcctttacctaagacagggtttctctgtgtagctttggagcctgtcctggaacttgctttgaggaccaggttagtttacatgtttattgccataaagagacaccatgaccacagtaactcttataaaggaaagcatttaattgaggtggcagcttatagtttcagaggtttagtccattctcttcatggaggggagcatggcggtgtgcaggcagacatgatgccggctacgtcttgacttgcaggcaacaggagggtcctgagacactgggtggtatcttgagcatatgagacctcaaagtctgcctccacagtgacacacttcctccaacaagaccacacttcctaatagtgtcactccctatgagattacattcaaactatcacagctggtaacaattattctggtttacaagataatttactgccaatgaaatactatttcctatctttctcatactattaatactcaatacctttaaaaattaattgtgaaatgaaacaacttggattatacattaaagcaggcagggagaaaaccctcaactcctcagtcttctgaaattttccataacattcttagaatcagtaagatggatgtaaatcaaaagaatagcatgatctttccagatagacaggcaactgactgcaaacgaaggagaaacagtgctgaggaagtaagctggtgtgtgtgtgggggtgcccacacacttgtgccacgcatggaggtcaagacaccgtatgtcctgctctgtcactcccttctcttctccctgaggcagggtctgtccctgatcctggagctgagctggtgaccagtgagcctcatctgctcccccacagcgtgtttctctttaaacatgagtgctggcatctacactctggttctcatgcttgcacagtaagtgcttctaccactgagtatctccctagcctgttcccacccctttggctttttatagctcaggctattcgtgaatttgctatctaaccaagtatgaccttaaactttggatcctcttgcttctcccaagtgcaccactatgctctgtttgtgtggtgctgggaatcaaacccagagcttcctgaatattaggtaaacattctatcaactaagccacagtcccagccctttcttttttcttcttcttttttttttgtttttgttttttcaagacagggtttctctgtcctggaactagctcttgtagaccaggctggtctcgaaatagagatccgcctgcctctgcctcccaagtgctgggattaaaggctgtgccacctacgcccagaccagccctttctttttagctagattttctctctcaacaaggacaagagttgaggaaaacacactgcagagcaagaagaaaccatgtatctgtttttagagataaaagaacaaatcctttatgacagccaggataagtaatcagagggcagtttagaaagacctcatgactcccaaggcagtattctgaatctgtcctacagacgtgtattgttcagactgcagatttcaatgaaatgttgtttatgattccaaataaatttatgccatggttactgtcaaatacccatgctggcacatagccggcactcaaagtagctttcatctctttcacaatgactcaaaagaaaatattcatgtatctttgagtcacctgaggaagtctgaatactaccactatagcacatcaagagccttgttttttttttgttttgtttaggaagatcactttggcggtatgtagacaaatggaaggactatagagacagaagataactaagtcaagatttgacacagttactgttccaatctatgaggcatgcatgagctgagtgtcctccgcaagtcagggttagttgtcaaaccaggctgcattcatatacggaggctttccttcggctcctatccccagcctcccatctattcctttttgattattgcttttgcatgtttccactggtatcccaccagtatttttaaaggtgctatttgcatattcctttttatttaaaatctagtaatatcctagaagttaatttctatttgtaaacactttctttactggagtatcaaattttaactagtttcatcctgatctaggcagcaggatgatttctcaatctttttactactgcatatatgacattataaacaactggagagagaaagaaaagaaaactatagactccagtagctaatatggcaaacagactctcaaatgagatatacagaataaaacagggtttgtgagggctagctttttgtcaacttgacataagctaaaatcatctgaaaaggagaaacttaaattgagaaattgcctccatagccaggtggtggtggtgctcgcctttaatctcagcactaaggaggcagaggcaagtggatctctaggagttcgaggccagcccggtctacagagcaagttccaggaaaggctccaaagctacacagagaaaccctgtctcaaaagaaaagaaaaaacaaaacaaaacaaaacaaaaaaccaaaatggactccataagatccagctgtaggcacctgtagggcttttttcttaatgattgatgagggagggcccaccccattgtatgcagtgccacacccttgagctccagtgctataacaaagcaagctgaacaagccaataaacacacttcttggccaatgcgtcagtctgggcctccaggttcttgccctgtttcaatttctgccctgactttcttcagtgataactgtggtgtggaagtgttttaacaaaagaaaccctttccctcccaagttgcttttggtcatgttttttggtttttaaagacagggtttctctgtgtcatggtgttttatcgcagcaataaaaaccctaaagggaacagtaggtaagatttggttctggaaatgtttagttagaagtgctcaagggataaattcacagtaagtagtaggttctgtggatcctaagctcaggaaactggtccaagctggagacagtcattttggagtactggccataaagccaggcatgactatttaatgaagctcactagagaacactgatattttgttatatgcatgtctcatcttgcgcctcttcttaatttctaatttaagcaaaagaataacaaagtgtacctacagtccttcctcacttctcaagatctttgctctgccgtgctccatcaatctctacactctctactagatcactccccagaatccatcaacactctcttcttcctgaactcatgagctctgctcctgcataacccaagctgtaaggttacctccctttcttttctcaaatgcagccagcttctgcttctttctcacagctgctttggacaaggtcatttacaatggccacattcccacatccaaaggattctgtatttgactagacatgccagcaatatccaacagctccccattccttcctgctttaaatactttctccaaagagttcaaggaatcatgatccaggccttcttcctatcccactcattcatttaacaaatactaagaaaatatcaactacgtaccagatgcttttctggtgtatatgacaaaccaataaataaactaaatctttgccttaaaaaaaagtgtgtgtgtatgtgtgcatgctcctgagtgtgtgtttgcatgtacacacaggggcccttggaaatcggaagagggatttggaacccctgaaactgtagttatagatggttgtgagccacctctgggtgctagtaatgaatctggatcctccgcaagagaatcaagtgctcttaacttcaaagccatttctctagctcaccaaatttctgcctttgagaaacttttttattggtatgggggaaaacaataaacataaaaaataagtatgttaagaggtgatgaaaaaaaggtcaggatgatgagtgcttaaagtatgtatgtgggagaagactacaaaattgaatatggtggtctctgtagctactactaagatgttgacaaagattccaacttaatggcaaacagtgggtccaacagtagaaaagaaataggaagtaaagcaaggacacataaaaacaccagatgaagatcactaagtttgccttgtgattttttaataccatagaaaatgggagtcactacagggttttgagctggtaagttacaagatatgccttatactaatctggttactgtattaggggctaagtagggtaaagtagatgagagattatgatagcttctatttcataacctgatagtactgctcagaatgatgagtggcacattttgcatactctggggtagagggaaccagcacagcttcctaatggattagatgtggggtgagaataaggtaaggtggtgagaaagagcaaaagtgagtgggacagagtggagtcatgcatgaccctgagatgtgggagaagtttctttttcgaggtggtcctctcatttctacttccagcaggctttatggcacacaccagacaaagctgttcttttatctttcatttatctattttctaatactataacaacccagcaaatatcaacaaactgttagacactgtatactgtgaaggacacttagcatgctggttaggtttttgtcaacttaacacaagctagagtcatcagggaataaaacaaggaaatgcttccatcagactggcctgtagagcctacagggcatcttgttttgattaatgattgaagtggagactcctttgggtagggccacccccgtgcaggtgatcctgggttataaaacaagctagctgaaggagctgtgtagagcaagctagtacaccaagcttccacagcttgttttagttcctgccctcccatcccttcttaagcaacagtaatgtacaagtgtaaaccaaataaatcctttatcacaataggaagcaaactagaatcctggggaaataacaaagatattcatgactttttcacttcatagaattaagagtccaggaccttagttagttctacgtcacacatctgtggtttctgtctttgggaggctaaggcagaaggattacaaatataaaggtaccgtgtacttagtgactctgcaaacaacaaaaactgcacaccataaacacaaccacccacagaaacaaaccaaatcaacaaaacaaaacataacttcactctattacattactgttcaaaacaattcactagtttcccatggatactcagactaacactcaaatactccacagtgaatcacgcactgtttcacgccctctccccctcataattgtgatccagcttcctttgagtttatcaagtatgttgggatttagtaaacacggtcttcccactcagagagttttcttttgaatgtacaaccctcatttattgttgtctatttaaaagtcaccacccaaacaaggccacctctgaccagtctccattcctttactaagatgaaagttccttaagagcaaggaatgtgtcatacatacatacatacatacatacatacacacacacacacacacacacacacacacacacacacacaaacacgcacgcacgcacacacgcacacacgcgcgcgtatggtttactaatgtggtctgtatcatctgtctttctctgtatatagtgtctctatgtatctggctagcttcatattcaagatcttcctatctctgcttcctagggctgagattaccaacatgtaccaccaaattcagctcctggatgctaattccacaagaattaatatctgtgaatgtcttagttcatcattattttcctggagtccttcagaggatgaggtgtttcatagtttgttgatgtttgcttaattaatataccatggcatgagaaaggaagctaagaatgaaaactaagaatggtactgagaagccaagaaggaaaatttcaaggagacagtaaatttactgcttttaggtctgactctgctaccaccacctcggctttatggatattgtcttctactattgcccctcccatccattcagtactcatctggaggaaatgcttttagaaaatcttcctaaattggagagtaagaatgagggtatctctcttcactgcaaagtcatttaatatagccacctttagaaggatccctatttcttcactggtaacaatcattaataaagacagtagcataaagaaggctacttctcattaaaagaacttggtgagtatagcaaaagctaaagtaggatgtatagttgttaatgttacaagaaatagtatcaagtgggaagatatctgttccaaagtgctagtgactagctgaaggtcaagttgttaagtatctggcaaaataccactgagaaaaagggctgcttgaagccagaattaaaggggcactgactacagttttacctgaggaaatacaggtagaatgagtggattgtgtagatccacacagctaccatattccaggacactgatgtcttctatgccaatgattttctaccaacatgattccctagctatcaaaatgtctaaaatcagtttggagactgagagtagagatctgcatgcttttaaagacacacggaacaactataatacatgtaagtggaatttgctatactgctcaagatcaagagcctgaaattttgaacatttgaagccacatcctaacactaaagcagtggttctcaaccttcctaatgttgtgaccctttaatacagttcttcatgctgtggtgactcctagccataaaattcttttcattgctacccataactgtaattttgctactgttatgagctgtaatgtataatacaggggatacacacacacacacacacacacacacacacacacacacacacacacacacacacacatttcatatatctgatatgcaacccctgtgaaatggttgtctgatccccaaacacaactcacaggttgagaaccactgcactaaaggatatcatttagagtctcagaggtattttcaataaacttcccactgctgggaaaacatatgcatataagatgcatcacagtcgggcatgacctcagcatttcagaggcaaaggcagagggatcatgagttgaataaaagccaacatgtgatctagcctcaaaaatgaaaacaaacaacaataaaaagatgttttccaaattctcatttcatctctgatgaaatcctcattcttaggttctcaagaatggcacaaagcacttctgataagtagcaatttcttgggggaggggaatgttttacagctacatttctatctgtcctcactggcaaggtagacataagaagatatatcctaagagccaatgccaacctccatcttaaatttctttaaaataaggaagagggctttgtccaccttgacttggagctggtatactatccagccagactagaagaaatgtagaaaagtatatcatggactgtgagaagataaaaccctgacaatctgaataagggaggatctggaggagtgctccaaagtagaagttactgaagccagctctccacgctaggtccaggagctaagatcttacattataagactgaactgttgagcagactaataattaatcagtattgtagtttctattgtaagatttaactactgattaaaaactccttcctggaaatagtgaggcacaattgtagtaacaggcaaagagtgtatatgttctgtgcatcactcataattatgttagaaatggtattaaagggtttggagtgatggttcagtggttaagaacatttatttttcttgtagaggacccaagttcaattcccagcacccatatcaagtagcttataattgcttgtaactccagctccaggggatggccttaacctcaggtacatgcacatatacaatctcacacacatatacatgttaatgaatattttctttttaaagaaatggtgccaggcagcagtggagcatgcttttaatcccagcactcagaaggcagaggcaggagagatctctgagttcaaggccagcctggtctacagagtgaattccagggccgccaaggctacaaagaaaaaaaaaatctgtctcaaaataaaataaaacggggctggagagatggcttagaggttaagagcattggttgctcttccagaggtcctgagatcaattcccagaactcacatggtggctcacaaccatctgtaatgagatctggtgccctcttttggtgtgcaggaatacatgaggaggaacaatgtatacataataaataaatctgtaaaaaaatagaaatggcatttaaggatttttgagattttgttttgtctttttttgagatggggtttctctacttaagtcctggctgtccttcaacttgctctatagaccagggtggcttctactctcagagatccacctgcatcagcctctggagtgctgggattaagagtcttgcacatgtgaacatggtccagtcttctttcatctttagaaatccagtttttttctattgcctgtatgataaactatagatgctcttattccactttcttcttataggaaaaaaatatccctctctaagcagttcacatttttattttatttgcattggtattttgcctgcatatatgtttgtgtcagattttggagttacagacaattgtgagctgccatatgagtgctgagcattgaaccaaggtcctctggaagagaagtcagtgctggtaactgctgggccatctctcctgcccatgcctagatttcttaaacctcagccattttacatttccctatactgactgacacttttctgcatactctcagggggcttggagatggctcagtggttaaaagcactaactgttcttctacagaaccagggttcaattcctagcacccacatggcagctaacaactctctctaactccaagatctgacacccttacacagacatacactcaggcaaaacaccaatgcacaccaaaaaaacacgtactgtatgcatgtgcaaaatacttagacaataaaaaatattctccttttacaaaaaaaaaaaaaaaaagggagctggaaagatgactcagtaattaagagcaccggctgctcttccagaggacctgggttcaattcccagtgactataccgcaactcagaaccatctgtaactccagttccaggggaatctgatgccctcttctggcttccaaaggtactgaatgcacatggtgcacatacatgcaggcaaaacaactatatacataaaataaaaataaatcctaaaaaaatatttcagattcacaactatggagttctactccatggcaaggaacactgaattttgtctaccatgatgagcaccaaaatgactttctcccaatgtctccatcccccattttctagaacaaaagttcaaagtatagtgttgttgatcagatgggatttcaatgccaaaaatttcatacttttagagtccaaaccaacttgtttgtatacactctgtggtcaccaaaaaaagaaaaagaaaaaaagaaaaagaaaaaagaaaaggaattcatgccctgtatctatttagatgggggcagagaaagaatagaaaaggaaattgttttctgttgttttttttagacatgacttcttaaaaattgtatttataagtatgcaacttagttcaacatgaaaagcagctaacagaagaaaaaattctatatatttatcttaatcacaaacagaacttaattcccataagggctgacaactgactaattaaactaagggttttttttgttgttgttgttttgaggggcatgtgtggaaagacaaaagcatttttcattttccgtagcattcatacctctcattcctactgacaaagcatgcctttcctgctcaattaaacctccagaccttaattgactactttatttttttttaaaatgaggttatttctccaatcctgtaaaatataatcacaagtaactgcttggtcaggcaattaccaagtaccaccacctacagacagcagaccaagcatccaatagtacacttacataaacacaagtggtaactcactacccacaaagataatgtgggtggctatacttaaaaataaatagggctgagaatgtagctcagagttagcaaatatgtctagtagggtcaaggtactgggctcaatacccagcaaaggaaaacagaattaatcagtgcctcattaatctaataatttggatttttaaaatgtacaaagccagctgggtggtggtggtggtggtgggagcagcacacacctttaatcccagcactagggaggcagaggtgtgtggatctctgtgagttcgaggccagactggcctacaaaatgagttccaggacagccagggtacaagacagggttacacagagaaaccctgtcttgaaaaacaaaaacaatttacaaagtcatctctcaaaagactccttattttctagtgtctaaatgaaggacttttgaaactagttgaatatgaattctttattaattatttttattattctgtgtgtatgccatatacacatgtgtgtgcaggagccaggtctacggctctccatcttactttttaagacagggtcttgcattgaccctggggctcactgactgtaagggctggctagtaaaccccaaggatccttctttttccaccctcaggagctgagattataggcatgcatcaacacaacttttttttaaatgtgggtgctgtcaatctgaattcaaatcctcatgttttcaaggcaagcactttattccactgagccaactccttagcctccttagtaattaattactttatgatttgcattttatatcttaatttcacaaccctaatactgtctatataggtgaattacaaattgtaagtcggtccctatgctatttcaatttccatttcaatctggacaaacaatataaaatacatgtaaatatgctttgaaattttgggacaggcactgggtacactctaccctattcagtggtagaacacttgtctagcatatccaaggctttagattccacccttggagtggaggagtggtatgttggggaagaactgagggtgggatggcataggagcaacaaggtcacaccataaacccacatctctaaatcctactattttcagacatgaactcactaatacatcaaattcttgaaaggtggcaactaagatcgtccttggctatttttatcaagtgaacataatctaagtaacattacccctttggattatgtagcagttggttgtgaccatttgccaaataggttggctaaatggtcaagcaggacaattcaaattagccaaagaaaggcaacactgctaacgagagatttggcttcggtgcatgttttcccagtgtccacaggcttttccagtttgcccaactgtggttttcccaaacctttccctcttagaaaggcccccaaaggacactcgagtaaggaaacatgattcatgacagcacgtacattttaaaatgggggcaggtcaaagcaaacagactacaattggtgtaactgtaaaagcaatgtctgagaacaagaaagtctttttcatgctcttctgtccatcattcctgccctagaggaacaagagtactttaaaatgtttctttttttaaaaagaaccgctaaacaatcttgacgcacactataagcaaatgttaccaagccgtgaggactttttcgattacccaaggttcaaaaggttaaagagttaccatctgtccttaacatgagaagcataaaaggtttagtcaatacgctggctattttaaatacctcaacaaacttaagcaccctggtatcataaagagaacccagtagttaaaactaatttcaaactatctaaaataaatctcgggatgactcaaaatgagtctcaaaatcctagatccaagctcaagtgcttgttccggcttgtctctcacttactttccaccccaacttgtgagtgtatatgtgtgtttgtgtgtggcagaggccacccacactcagcctaagtagatctcagggctcccaaacctgcctatttccggttttagtctctccagaaacctaaaccaattaactctaatgagtcaatagccaataaaacaactcctgaattacattttcacagtttaagaaggccgctagaactaaagggattggtaagcgttacggtgaaacttgcaaagaagggtgaattgttgagataatcgctctttcaattcacaaggtctactaagccttgtgtgcagaggccctacagggtagcaagaccggaagtcggtgcaggtattgttgatacagtaaaacaaaacaaagcacccccctcctccaccttcaacaaaccacaccaaaaaaaaacaaaaaaacaaaaaaaacaaaaacccatgccacaaaaacaacttccccagagcacgctcaccccacccctcatcacgagccccaagacaagagcgcgagatggccgtggtgagagtcccggggaaaggtcggagccggggcagtgccgcgcggctcgcggcctgcaagcccgagcctgcaggtggggcgtgcgggagggaggcgacgcggggccgccgcttacctgcggcgaagtggagcggggtggacttcctgccggccgtgtcgcggctgttcaccttctcgggcgtcaccagcctcttcactcgctccacgtccccgttgcggcaagcctcgaacagctcgcgggcagacggctctacggcctcggccaccgcattcgcgcaggccgcgcccccgccggcgcagcggcgaccagacatgatccgggccgccgccgccgccgccagcagcagcgccagcaaaggcagcaggagccccggccccgcgagcaggagggcgaggccccccgcaggagacgcgctcagggcccgggccgcttggctccccgctgtcaccagagccggcgcagtcccatggccgcgccgccgcgcgccccccgctcgactccgtgacccccggccgccccaccgcggcggaggcagcgcgaaacccgcccgccgagcccggagcgacgcggcggcggaagcagccgagaccgcttctgccagctccggcgggtccccgggagcgcgcgtgacgtcagcgcgcgcgtgcgcagtggccgcgctccggccgggccggcctgggcgagcggggccgcgcggaggggtttgtgggaaatgtgcggctctcgggagccttcggtggagggaagagaaggggcttcggcccaccgccatctttacggggcctctgccgaggaccggagggctcgctcgctcgctcttctgtttctcaaagcacagccctcccgagatgagtttcattgctcatatcctggagatgaaccttcgcaagttttgttcctgctgcccatgcgttttcttttggaagccttagcgtggaaaatgtctgtagttttgcttccatgccttcccatgggagattcctgctcccacctcctccctctcccatgttctttacagtgtctctccgcttaaccctcggcatcggattttgtttttcttacaagcctcttctcagaaacggactcgttgctcttacggagaacttgggatgaacggccctaaatcaagaaggcgacgaattctaaagcaacaattgcggggtggggtggctctgattagctacatttcccatagtaaattattagcccagtgctgactagagaacctatatataaatcaggattgttaccggatgtggccaaggtgccggtacactaagcgtgcacatcaagaaagtttcctgaagttctttttttttttctctccctgtgatcaaagagtacaagcgcacaattcatttttgtgtttaaggtaatagtgacatctttgtgtatgactttgtttcagaaacccgaaagaaaggttgatagagattttgcttgtgctgaaagtgctgacctttgtcatgctgacaagcgtttccccctgtgaattgacttaacctgtttttcaggaaatccagtttttgtttgggagtgttgactcaccgctgtgggagaaaagcagggtactcttttttgagcgttttagtaaatgggagcattgttgtatgtgtttattctagaatcatgttcttagggtatttagtgtacatttaaattgatgcatcttaataaaaataaacattcatgaacataccaaaggattagaacacatactaatgattgtgtcgaatttttcttcatttcatctacttgccaaatatattcccaattatttttttatttaataatttctgcttatctatatcctcccagtatatcttaagcaacatcatgctggcacagcaaacactttatctacggatgataaataaaagacccagagactgatactggggtcaagcttcaagccgaacatcagaaaagcaaagcagcccaccaccagctcttcttacctctacctcagctcagaccaaaggatcgttcttcagactgcttcggacttcactgctgggattaaaggtgtgcatcgccatacctgatctctatagcttgaggctggctttgctttctgaatcctcaggcaagctttaataaatcataaatgatgtatctcctacgcctaacatttttaaaaaagcatcatatgatttctagagaaatgcagttgaaaagcacattaggatggctattttaatgcaaacaaaaattaacaaatgttgatataatagtacaaattagaatcatttttcattcttgatgggatcataaactgtccactcattttagaaaacaatctggcagctcctcacaaaacttaacatatcaggactggagaggggacaactcggtggttaagagcactatctgttctccctaggacttgggttcagtttccataaccatagctctagtctcaggatctgttgcccttttctggcctccccaagcaccaggcatacatatggtgcagacaaaaataccaaaacataaaatgaattggttaagccactttagaagtcagtgtggcggtgtctcagaaaactgggactcaatctaccacaagacccagccataacaccaggaaatttgcagacaaatggatagaattagaaataatcatcctgagagaggtaaccagacggagaaagataaacatggtatgtcctcactcataagtggatattagctttaaagtaatgctacaatccacagacccagagagactagttaacaaggagggttcattgtgtgtgtgtgtgggggggggtgcccggatttccctgtaaagggaaatagagatttcatgagtggattgagggtgggcaaggatgggaacgtaagtcatcagggtgtgtgtgtgtgtgtgtgtgtgtgtgtgtgtgtgtgtgtgtatgtgtatgaggggggaatggcagagagggagagtactgaaaggggtatttcggggtcaggtaaaaacctggcacaagggaatctccaggaatctccaaggaggacactagttaagactcctagcgataacagacatatatgtagcctgaactggtcatctcctgggaccagattggtgcctagcccaaatgttatcagagaggcttcatctggcaactgatggaaacagatgcagacccacagccaaacattaggcagagtttggggaatcctgcagaagagggagagaaaggattgtaggagccagagggtcaagaaaactcacagaatcaaatagcctgggctcacagagactgaactgacaaccagggagcctgcatgggactgtgcatatatgttacagttgtgtagtgtagtcctcttgtgggactcctaaccgtgggaacagcgactgtctcaggctcctttactggtttgggggaccctactcctcatatggggtcaccttgcccagtcttaatacatggggaggttcttagtcttactgtgacttgataagccatgcttggttttgtctcatgggagacctaccatttcctgaacagaaatggagggagaatggactggggagtagaaacagagggggcggggagaatgggaggagaggagggagaggaaaattcagccaatttaatgttaacaaaaaaatacacataaaactagcatctgatgtacttctgggtgtatatggtgaaacaatctgaaatcaggacctcaaatatttccacaatcatattcaccatatgattgattactcacaacagcaaagaggcgcatgcagtccagttgttccacgaggggatgactatgaaatgtgataaatgcatatcgtgctttaactctcagcctccagaaaaaaaaaaaaaaaaagggaatcttattgggtgtcccaacataggtggttatcgagaatataatgttaagtaagataaagcagctaacaaagacaagaaatagttttacttctttccttcagagagcagccttagcaaaataccacaaaacagatggtttaaatacaattttctccccactacatgcacacgtaggtggagtttttctgtgtccccacagtcacccccaaataaccacacagagaattattattgattataaattctcagccaatggcttaagcttgtctccaggcagctcttacaacttaaattaacccatttctattaatctgtgtgctgccccgaggtctgtttacctcatctatggacttcccatgttacttctttcgagtctgtagctcaagactcctcagccagacaagggacaagttgaggctacaacagagataccaggatgatccagatgcccaaatcacaggtcacctgttgaggaaagctgtggacacagagtggagttttctgagagagaggctgcggatggcagagctggaggggagaagccacccagccctttagaactcgggcgattctatcacaaacccacgatgtaggatgtagagctacagaagttggtgttcaccctgctgggttttattcttgttttgtccctaacttttccttgttatgtcccatttctccattttagaacaggatgtttattctatgtcactgtgtattggaactttgtaacttatttttttaatgttataggggcccatagttaggaaattgcactgaatctcagaagagattggacttagaaattttgaacagtgttaggactcttaaagtcccctgtagggactttttaggtaggaatgaatgcattttgaaccatgaaatggccataaggctataggtaccagggacagaatgttatttgaatgtgaaatgtcccccatagggtcatggatttggacatttagtctcctgctagcagatagggttgatggtagaacatttaggagatgagctctcacagaaggaagtgggtcactgagtgttgtggaaaattattttagggcgtgttgcttttgtttatgctgcatttgcttaactctgtgatgctgtgattctttgcctgtctaaaacacctggtggtctaataaagagatgaatgtccaatagcaaggcagaagaaaggataggcagggctgataggcagagagaataaataggaggagaaatcatggaggagtaggaggaaggaacagcaaggccaaggagaggaggatgtcaggggccattcaccctcccagtcagccgtggagtaagagtgaaagcaagctatatagaaggaaggaaagaaaaagtccagaggcaaaagatatactgttacgataaatctttccgccaaaagccaccgagccccgccgccacgtgtgcactttacgccaactgcccacccgagttagggcccaaattaatatacagaacttgtattaggttcaaatgctgcttggccaatgactaggattcctcatctgttagctcagtcttaattatcataaatctatatattttataagacttatcttatagaggatgccttcatttggcaccctctcttgccggtggatcacattgcaccgctggaggaagagtagaggggaaaagggacattttctgtttctccttgcttaaatatgagtctccttgctatgtcacttcctgcctggatcaccacttctctactacatttcccagaatcctctttgactcctagtcccgtcatacttgccgtctcattggctcacagtattttattcaataatcaataagatgaacatacacagtgcattccccatccgtagatgggataaattaagaaatgctggcaaaaaacaaaccaagattagggtgggccctcataactaagaataagcctccgtgtgtgatttatttgggagctgggtgataggcccccaaaagagcaaagagccaaagagaaaaaaggaagaaagaaagaaaccaacaactgagggtgtggctttgagtttatacagtggccctactttctggtcttttctctgcttcctgactgtgggtgcagtgtgaccggctgcctctagtgacagttatcatgccttccccacctcaatggaccacatctcacaaactgtaagcaaaacaatcccttcctctgttaaaactatttctttttaaaatttacagtatttttattaagttttgagagtttcacaaatgtatacattgtactttgatcatatttactccacaatcctaactcttcctagagccaccccaactccttccaactttgtgccctcttttgcttaactttgtgccctcttttgctttgtttttttaaaaatatatcttattatatatatatatatatatttacatatagttgtaactatataaataaaacagtatacacaaatatacatacacacatatatgtttgtttatttgtttgtttttttgagacaggatttccttatgtagacttggctgtcctggaatttgctctatagaccaagctggccttgaactcacagagttccacctgcctctgtctcctgagtgctgaaaataaagttatgcatcaacacctttaattttaaaatatttaaaaattataatataattacatcatttaccctttccctttcctccctccaaaccattttatgtacccccttggtttttctcaagttcatggcctctttttctttaactgtttgtgtgtgtgagtgtgtctatgtgtgtatgtgtgtatgtatgtgtatccctaaaatatatgtgatgctttcttagtctgtataatgctgtgtcttctttttttaaaatctagtccaccattccagtttgtactgcctgcacactcagtgaagccatccactggagcacggttgaattaaccaggagagccacattttttgtttgtttgtttgtttgtttttttgagacagggtttctctgtgtagctttggagatagtcctggaactagctcttgtagatcaggctggtcttaaactcacagagatctgtctgcctctgcctcccaagtcctgggattaaaggtgtgcaccaccaccgcccgtatgggagggccacaattataaagaaaactcttccttctccagaaggcaccaactgtcaatagcatctcaggtaagggtagggtttgtgagcctttccccttcccattgtgactgctgacttccagttcactggcttctcttgtgcaggtgttctgcaggcaaccgcagctgctatgaattcaaggctagtgggggaccaaagtgtttctgctatggaatattttgagatccagcctttggcctcactaaacatggagcgtattgttaatgccagtagggctacttttgtttaccatggcctcagggtaatatgcctcctaatttgcatatctatgcacctaagcatctgaataggcctgcacctgggcagggagatcagaggtatgtgagtaacttgtgaggatggatggttaggagttaggggcgagtagccagagcagagagggaacaaagagaggaatggttccctcgtggtgttggcaggatggttaagaaacaccaaaaaagatggctaataaagaaatgactctagttctacaacatggacctgagagctctctgaagatgacaagatgcctgtgtttgatctgtattgccgttgggttgctgggagcttccaggtccacacccccccactcaggccgaacctcatggctgttgtgggttaaagctgagacaagccgggtcacgacaaaggccatagcagtgctgccatgtccagaagacatccaccccggttcttcctgacctcattcttaaatctttctgctccctcctccacgatgccctctgagcctgggggaagggagtatgtatgatggagatgtctcatttgtagttgagcactccacagactgtaattttctgcactttgaacagttgtaagtttctgagttaattaccatccactacaaaaagaaatttttttttttttctgagaggtctgagaactgcactaagctatggcaatagatacccagatttaaagggcaggtgatgctgcgtccacttagcaaagtagtagtagtagatttacctgtgaggcccatagctcttcaactatgtgttcttggccagacttatagtcccaggaatgtgtttcctcctgtgaagtaggccttaaatctaagtagaaagtaattgggttacccccataacaactatgccactattatacccatgggcatatcttgccatgctcataattattgtggctcacagggttcacagatgggttatttttcccctagcatctggcataacactctctagaaggaagtgtcttggttattaccaacttgatttctccatatcctgtaaccaaagtgtgtggtccctcaaatagggtcttacaatcaagttctggtgggcaaccaagaacaatgacaatagctgtattgttttttttgggggggggatctactgggtggttttgtgtgtcaacctgacacaacctagagtcatcagaggaaggagcttcagctgaggaaatgccttcttgagatccagctgtaaggtattttctcatttaagtgaccaatgggggagggtccagccagtgacgggggtgggggggggggggtgtcatccctggactgctgatcctggttctataagaaggtgggctgagcaagccatggaaagcaagccagtaaacagcttccctccatggcctctgcatcgtctcctgcgcctgcgaacctgtcctgtttgagttcctgtcctgactttaatcagtgatgaacagcaacgctgaagcgtaagccaaataaaccctttcctccctaacttgctttttggtcatggtgtttcatcgaagcaatagaaacctaaactaagatgggagctctgggacatctccttaacttgcttcttgtcaaatattttgttgtagcaatgggaaaagtaaagaaccctcaggacagccgggcgttggtggcgcacgcctttaatcccagtactcggaaggcagaggcaggcagatctctgttgagtttcaggccagcctggttaggctccaaagctacacagagaaaccctgtctcgaaaaaccaaaaaaaaaaaaaaaaaaaaaaaaaaagaaagaaagaaaaaaaaagagccctcaggacttaattgtttttccccaaacccctcattttatttttgttgcattgaagattaagtttcaatatgaatttcggaggtgatgttattattcatatcacatatcccagcactatctcttcctatatttataatctctttatagttaccctttactaaaatgcctatttgtctcctgtccattttttattgtttgccttttgtttgtaggaattcttcatatattttggtaacttaatcctcttaatccttcatcaactacatttgtgggaaatatcttttcccaatttgtcatttaatgtgggaaattaccaatatggagtcaggtaaaaatataagggaatttattagggaaaagccttacttacagagtgacctagccagctggcagggcagcagtaaatacagcaagctgaagatgaaatggaagaagggctgcccacatcaccctgaccacaccctcgcaggcgtggtcaggcacacctgtagccagcccctagcaggtggggttacagtgtcccctacagtcatttgttcttttttcactttctcaatgtgaagattcagagttatcttgtctttttggtttttttttttttttgttgttttttttcaggacagggtttctctgtagctttggagactgccctggaactcgttctgtagaccaggctggtctcaaactcaatgagatccacctgcctctgcctcccgagtgctgggactaaaggcgcgtgccaccaatgcccggctgatatcttggttttaatgtagttgaatttatagtattttcttatagtgcttgtgcctctgtcaaggattctttgttactccaaagtcagaaagataaaattttcttatggactgacactgtaatgtaaggatatcatttccaactggactggcaaaatggctcagtggtaaagactcttacagccaagcctgacaatttgagtttaattcccaagtagaaggagagaaccaatcccagacattatcctttgacctctacactcgcatgcccttgtccccccccccccccccccgagactgtcctggaactagcttttgtagaccaggctggactcgaactcacagagatccacctgcttctgcctccagagtgctgggattaaaggtgtgtgccaccaatgcctggctcatgcccttgcctctgaaacaaacaaataaatgttttaaattttttaaaagatttaaagaacaattattttaaagaacaattaaagaacaataatttttttcttaaaagttaaaattttcctttttcttaagatggccgcggctcaggacggatgtggcttagaagctgctgctggaaacgggcggcggatccacccagggattcctgaagcggtgtttgtggaagatgtagattctttcatgaagcagcctgggaatgagactgcagatacagtgttaaagaagctgaatgaacaacatcagaagtatatgtttatggaactcaaccttactgaaaaaaaaaggaggctgaaaggtcagattcctgaaattaaacagactttggaaattctaaaatacatgcagaaaaaaaaggagtctaccaattcagtggagaccagattcttactggcagataacctgtattgcaaagctttggttccgcctactgataaagtgtgcctgtggttgggggctaatgtaatgcttgaatatgacattgatgaagctcgggcattgttggaaaacaatttatcaactgccagaaagaatctggattctcttgagaaagaccttgactttcttcaagatcagtttactactacagaagtcaatatggccagggtttataattgggacataaaaagaagaaacaaagatgattctaccaagaataaagcataataccggcagttgaaaatgtggttcaggttatccttgaagattgagtaggttttttttttttcacagcaagaaaaattaaaactttaaaaacaccattttattttatgagaacaaaattactttcaaatattttatgaaattaacagtattttttttcatatttccctgcaaagtaatgctgctttcattttattttatctgttataagacaactcttaactgaaatggcccaaaactgtgaggaatgctatggaggctactgaatgctggctatcagcacagtttacacaatttttttgtttattgattgatattactctcaggtgatgaggtaaaccttttagaggcaagaaagaccaacagttcaatatttataaacttgttttttttttttttttttttttttttttttttttttttggtttttcgagacagggtttctctgtgtagctttggagcctatcctggcactccctctggagaccaggctggcctcaaactcagagagatctgcctgcctctgcctcctgagtgctgggattaaaggtgtgagtcaccaatgcccagctaaacttgtttttctttagtatttactatcatcctttgttgtattctgtaaatggggctttatgcatttctgcttaaccagtagcttttatgatactctaaccttttcagaaagtgattatttaatttcctacacagtttgagggctgctgccatatgtagaccctgaaataagtgcactgtttctttgcaagggagacttgatcaacgtgagagagcactacccattcaaaactttaagctaaggtaattttatattatgtaacagttctccaaagcaccttgaacaggtatattaacataaacataaatctgcagtggctgaaaagagttgtaagctttttttatttgtgattaaaattgcataggactgataaaaatctctggaaagccattggttctgtgacagaagtacttggtgatacagattctggtaaaaacacatgcatgttattctatctccatgtagtaaaacgcatacttgtacgacgttttgtacttgtatttcatgttattaaaacagtggtattcaaaaacaaaatgttaaaattttcccttttatacttaaattactaatacttatggacttgattttggagtataatatgaaataagtcttcattttctttatattttgcccataataataagaaaatctcctcccccttactaagtgtttccatcctaagaagagtgatatagtgctctgttccagatggactcaattgatctgcccatcctttgtcaataccatattgacttaatgtttaatagctgtcactgatcactaatccttagtagcacatgtagcaatgataaaatttgaaaaatttagaagtttactgaaaaataagcaagtaaccaattctttctaaacaagatgattgtttttttttctagtcaaaaatcaagtcattaaacactaagtaatgggcaattgtatcatttagtaaattccattcaacagattatatctttatatagctttgccactgtagataagataaacagagtaccagctatgagaggtagtagccaatctttatagtattaaaacacttaaatcttataaatgaataattgctttatttacacacccctgtttattgctgttctatttactatagtgaggaaatggaactaacatatatgtccagcaacagatgaatgaataatgaaaatctggtacatacataaactggaatattaaaaaacagctgagcagtggtggcacacaccttcaattccagcactcgggaggcagaggcaggaagatctctgagtttgaggtcagtctggtctacaaagggagttccagggcacctagagctgttacacagagaaactctgtcttgaaaatcaaacaaacaaaaaaagtggaatattattcatctgtaaaggaaaattaaatctccaaacttggaggaaaatggtcttagaaagtataatattagctgggagtggtggtacatgcctttagtcccagcactcaagaggcaggaggatctctgtgaggcctgactggtctacatactgagttccaggactacaaaggaaaccctgtctcaaaccctcccccaccaaaatgaaagaaataatattaaatgaggtcacccaaacttagaaagaaagggggaaaaacccatatgttcttcttcctatgaagatcctagcttataatgaatacatacatatgatagctgtaaatggggttatagtaaaacattgagataggagaccaagaaagggtaatattagatggtaaagaagaatgtgtagctggaggttgtcctgccctgtcccacagctgcttttaaaataaccgctcagaggcttaatgttaattataaactatttggcctattagctgaggcttgttattaactagtagttgtaactcttacaacttagattaacccatttctattattctatattttaccacaagacttgtggcttgttaccttacatcttgcttctccagcagctgttggcgtctcctgaactctgccttttttctccctgtttgcttggatttcctgcctaggtatattctgcctggttattggccgaatcagcttctctattaaccaaaggtaataaaacatattcacagcatacaaacagcaacccacatcagatagaatgctggcaaaaggatacatgaataaggaaaagagtatatgaagccaatcaactgtcatttttttcttttttgtttaaagttaattattttcattttatgtgtatggatatattgattgcgtgtatgtttgagctccatgtgtatgcagtgcccatggagaccagaagagggcgttggagcttcaggaactggagttacagaccattgtgaaccactatgtgggtgctgggaatcaaacccaggtgctctgggttaagagcagccagttctcttaatggctgagccagtaccccagagcctatgtatttttctctcttttcctgttttttttttttgtggggggtgggtgggtaagtgtataaaaatataattgatagtgaaagtataaaactgtaagtgaagctccatgacttcattttagctgtatagaagtgtttgagtggctaccttaatctagtcccaaggtgtttttgtaagttcattacaataaagtttatatatgtatatgataaacaaccttcaaaaattccaatatattcattgaaagtcttattttatgtgcatgtgtgaatatatatatatatatatatatatatatatatatatatatactttttgtttgctttcaagcaaacactgtataactgtgtaacagcagtgtcctggaactccctttgtagaccaggctgacctcaaactcagagatctacctgcctctgcctccccagttctgggattaaagatgtgtgccaccaacacctggcctatatgtattctttaaaaatcttatcttatgtatgcatatgcgtcatgtgtgtaggtgtctgaagagatcagaaaagggccttggatctcctggaattggagattcaggttaggagtcaccctgtgactgtgggaactgagcactcaggaggcaggtggatccctgtgagtttaaggtcagcctggtctacagagtgcattccaggaaaagctccaaagctacacagaggaaaccctgtctcataaaaacaagacaacaaacaaacaaaaaagaaaagagaaaatgaaggaaggaaggaaagaaagggagagagagaaagaaagagaaggaaggaaggaaggaaggaaggaaggaaggaaggaaggaaggaaggaagaaaacttcaggggactggagatatgttgtggtagctaagagtgcttgttgacctaggtttgcttcccagcatcctcatgggggcttacaaggtggttcatatcttctgacttcagtgcacaccagacatgcacatgggcacatacatacatacaggaaaacactcatgtacataagaaagtaaatctaaaacagaacaaaagaaaaaaagtaatactagattgattccaggggctggagagatggctcaaaagttaagagcacttaatattcttgctgaagaacaaggttcagttctcagcactcatctcaagccgcttgtagctacctttaactccagctccaggggtctgacatgctcttctggcccccaagggcacccacatgtacatgaagcatgtaaactcatgcaggcacatgtatattcacataaataaaaaatatatttaaaaatattttcaacctcaaatgaaaattccattccctatttggaaggcacatttttacttttttgcatcctgaccacagttttcactccccttaactccagtccccccttctaatccactcctcctccacttctcttcagaaaagggcggacctcccgtggctatcaaccagccatgttatatcaagttgcagtgagactaggcaccccctctcctattaaggctggatgaggcaacctggtaggaggaagggtcccaaaagcaggcaacagagtcagagacagcccttgctgtcactgttgggagtcccacaagaagaccaagctacacaactgttacatattcgcagagggcctacatcagtcccatgcaggctccctggttgttggttcagttgcagtgagcccctatgagcccagagtagttggttctgtgggtttttttatggtgtccttggtccctccacctcccacaaccctccctcccccctcccatagatttcctcaagctgtggatttccatcagttgctaggtgaagcctctctgatgagaagttgggctaggcaccaacctaggagtatagtagaatatcggtaggcatcatttcattgatttttttttccagtcatgtttggttctattctaggtctctggggttatcctgcctctgggtcctggctctccaggcagtgtcaagggtgggtttcctcttatggtatgggttttaatctggaccagtcattggctggccactcacacaatttctgcgccacttttataccagtgcgttttgtaggtcgaaggttttgtggctgcgttggtggcttaatccctccactggaagtcttgtctggttacaggagatggctggctcgggctctgtgttcccccccgttgctaggagtcttagctaaggtcaccctcaaagattcctgagagtttccatttccactaggtttctagctctccccagagatgcctacccctattccagttgtgtctcccagtaccactgagagcacattttttaccatattgcccatccctcccagtgtgaaggcataaaaagaaagttacagattgatactttgtatgagaatgtctattacatgatttcagacgtgcttccctctgtaaaacataaggttgaagttttcaaattaccagaagccatcatggctctgacacttcttggtgaagacagccacctagtggaaacagcactaccaatgtctgaggatcagcagacccaatgaataggggtgcccagtccaactgcaaactgcaatgttgatttaaggcttttgaagagactggctgggcagggtatggtggcatgtgcctttacccagcacttggtaggtaaaggaaggaggagctctgtgagttcatggccagcctgacttatataatgagcactaggctagacagtgctacattttgttgtctccagaaaacaaaccaataaaaagaaaggcttggagatgtagctcaggagaaaggtggttgtctggcatgtgttcagtcttcagtagtattacagaataaacctcaaacccagaagcagtaaacaaaacaaaataacaaacaagcaaaccccaaactccaaacaacaaaaccaaatccatattgagataccgcagctctgaaagtgtgtgtgtgtgtgggggggggagtggagggtaggttggcgagggggtggtcttcgtaccctggctcagggattagagcaccatttgattagaggagagcaaactcatatgcgtgacttcgagtcggcatcgattgctctctgacgtggcaggaagtagctaactttgtaggctggagtattaatcacttttcttatttctgtggcagaatatttgacagaagccatttgaggaagggagagttagtttggtgcctggttccagggaataagtccatccctgcagggaaagggtggcactgaggttactaggtctgtggtggcaggttcttatgaacagcttgtttgcatcatttatagcggttgagattgattgaacccaggacttgcccatgccaggcagatgctctgcccgaagaataaaacgtgtaaccgttgatgttcgttcatgactcacagggattttagaatgtatgcaattcttcaactttagacttacaactttattggcattttcataacaaaggctattaaaaggacttggtagtgtgacaggtttggtgatgggtgcttgaactagatcagattttatatgcagagttttgttttcttctgaattagaaaggactgattcacaattatgagtcatgagaaattgaattagaaagaactaattcacaattatgagtcatcagaaatcggaggagggctgtagctctcagtggcagaactctcacctggcatgtacaaagttctgggctttgtccctaatattgaaaaagaagggggcacatgttttggcaaacactgatacttttggatttttggattgaatacgaattcagaaatttgtgtgaggttttccccagagtaacacatctggctctctgttaggctagggtgctaatatttcaaacatctggttgtgtatagctctaagaaagaattttgatattatattacagaattggattgcatttttaatttattagtattattactgttgctatccaggctaagttgctggcccctgagctcttggtggatggaggctgtcctacttaggtttctgttgctgtgatgaaacaccatgaccaaaagcagtttagggaagaaaccatttatttggcttaaacatctcagtcacagtctatccctgagggaagctgtcttagggtttctattgctgcaacaaaacatcatgacaaaaaaaaaaaaaaaaaaaaaaaaaaaaaaaaaaaaaagtaagccgggaagaaaagggtttatttagcttacacttccatattgctgtttatcactaaaggaagtcagggcaggaacctgacggcaggagctggtgacagaagccatggagggggtgttgcttactggtttgctcttcataacttgctcagcctactctcttaaacaattcaggaccaccagcccagggatggccccacccacaatgggctgggccctctcccatcaatcactaattaagaacttgccttacagctggatcttatggcagcattttctctattgaggttccttcctcttagataactgttcctggctggcccaggccaccacctgcgtcacttgcttaggggtggcatcaccctggtaggctgggccctctcccatcaatcattgatgaagaaaatgtattacagacttgcctacaggcaattcgattgaagaattttctcagtttgggtttcctttcccaggtaactctaatctgtgtcaagttgacaaccaggacaagagttttccaacggatgcctcaaggtagggccgagccagagcagtactggcgtgaccttaaagcccaggctccagttgggcctcgtattccagagtcaaggagaacgagtccagcacaggtgtaggttcttactgtgtgccagcccagtgccctttctctctggagctgctgaaatctacacagccctcattcccatcagctgggcctgtgagcaaggccagcttaggaggagcaattttcgagtgccatggctgctgcccacacgggacaagctgtatctcagcacactcagcacagcttagaggaccagactgtacggatctgctcacctagaggcaatttgttcaatgtagagacttcttaggtagcatcttattaattttctttacttttggaaacaaagagtatgagagagagagagagagagagagagagagagagagagagagagagagagagaatgggcatggtggcatgtgcttgtaattccaatactagagaacctaaatcagggttttgaggtcagccccagctatctaagaatactctgtcctctcaaacaaaaacaaacaaacaaacacaacaagccctttccccaaaaacaaagccaaatcaaaacatagtaaaaaataaatggcatccatttttgaagacagccagaaaacactatgaatgacactcggtgacaccaaatgttggcattttggtaataatgtctgaaagaaattcagtttttttccctcctgaaaacagattagacaacccaggtgatacttggaagcccaagtgctacttctactttttttccccccaagataggttttctctgtgtagttttggagcctgtcttggaactagctgttgtagaccaggctggtctcaaactctcagagatctgcctgcttctgcttcccgagcactgggattaaaggcgtgcgccaccaacgccctgcactatttttacttttaaatggaaaattgccttgattattttgagtgcaagtctttatttggatgtatgttttcatttctctctgctacaaggcagaagtaggatttctgggcaatagagttcacgtgattaatgttattaagggttgctagtttttcacagtggttgtaccagtttatattcctagtcagcagtgtgtggttctgaatcctgtccaaaacttacatttttgccactcctatgtgtacataacatatatttagattcacaaaatgtgtttttttaatgctgcatttgtattgtttgtgcattagttcttcaattgtatcatgtttatacagatgcattgttcttgaaacttaataggtatacacacatagggagtttgcatttattctttaaggtgaatattctaggtataactaaaggaatatgtgtgtgtgtgttttaagccatattaagttccaaatgtctgtaaccccagttccaagactctgataccctcacacagacatacttgcaggcaaaacagcaatgcacataaaatgtaaagaaaaagaatagtatgttcttttaattgctgagccatctcctgtctctagttttaaaaagaaagggtaacctctcaggttacaaacctctccctgaaccccagtatgtgtttttaaaaattatctattctagctaggttcatacctttaatcccagcacctgggaggcatagacaggtagatctctgtgagttcaaggtcagccagagctatgcagagagaacttgcttcaaaaaacaagcaaacaaacaattgctttttctaaggggtcaaagtgacaaacattcttgttgactagttatgtctaatccctgttgaattaatttagatcctgaggacaaaacaaaatgtgtaggttgtgatctctaagctcctttctctaactattctgattccatgtctagaatctctaggtctgttcatgggcaggcagaatcagccatctcagatcaagggactgtgtggttatacctttcctcatagctttggttgttcatgtggaagttcacataagaatattcatttcagcattatttatggtggccagtttttggacggtgtctcgagtgtccttctctctgaaagtggctaggtaaaatgtggagattggttaccatgggaacaggccaagaattagaagcagctaagtagatttatacagggctataaatgaacatacaagcatagcgtgggctgaaaaagtctttttgcagaaataatatattttgcaagaacacatacaagcaagtattcctttttactaactgtcacagttgcctgtaggaggatgaaagggggaggaagcaggaagaagtaggagataggaattaaagggtggatagataaaacttgagtgaatagataaacgatgtgtgaggctttgcgcagatgagtggtgctgatgggacttgaaatgaagaatatgattagcccagccctgtgggcagacctggagcacccacccctccacccctaaagggctcacaggggtgtgttcctgccctctttcatcattatttgcttggcaatttatatctaatctccttagataaaggtgtttcaaacaagtctgggaatacctgacttgcaaaatcttacctttgattttgctttgtgaaggagccatgactttgggagacggaggcaggaagatcaggaattcaagactgtcttcattatacactgagtttgagtctagcctgggccacatgataccttgtctctaaagatgaaacaaacccaaaccaaaaaccagaatatgatgttaaatgagatacttatacagttcataaaacagtatatttcacatgtatctgtaaaaccatattcaactcagtgcagttgaggtatggaagggagattcacaagcatccctgcaggtgtgtataacagcaagaacacaaatatagatccaacctatcacaaatgaataggaaagaaattcagtaggttttaggcagcgaatgaaatatttcatgcatattaggaaaaggttaaaacaaatgtctgattgattcagtctcagactggacgcccaaggcttaaatactccagcctttgggcaggtgttagtaacttagcatttcatcaggtcctctgcagatcttaagggaaaattcaaaaccaggtaatgaaaggttcttttttataattctcccagctttgtggtgcttttccatggccttgaaaatcctatctgttactctttaactgtgttaaaagtagaaaaactagtggtctgtccggtcagtgcatatcatgctgcaatcaaactcagatctttctctacagctagttactcattaactggaacatacgatgatagttgacattggggttgattgacatcaaagctggaagtctggattgccaagtactcttgccattgattctggtacaagagtttacagtagttcatttttattatcttcctaaagtatgatattggcagaatatctagcttctaaagtaggtttcctaaggaaaaaaattaaatttctccctaaaaaccactttacaataaacatgaaccacacttgtactcagatttgtaagaaataaattatccaaggaatcacattttacttacattatttttatacatttaaattaaaatccaattttagattacccacaatttacattagctttttcttttttctttctttcttttttttttttttttttgagacagggtttctctgtggctttggaggctgtcctggaactagctcttgtagaccaggctggtctcgaactcacagagatcctcctgcctctgcctcccgagggctgggattaaaggcatgcgccaccaacgcccggctgtttgtttgtttttcaaaacagggtttttctgtgtggcccaggctggcctagaagtcacttcatagaccaggctggcctgtaattcacagagctccacctgcccctatcacccgagggctgtgatttaaggtgtgcaacgctgccgagcacagtttcataaagtgtcctatttaggtagagagcaggaaaatgcaaatgagaaaaacagtggttgtgggtgatgaaaaaaattcttttaattaagcagaagggaaagaaaatgaacaagagagaaaagtaaaaataggacaatttgttattgggcagaaacagaaaggaggaggtgtgaacttggctttttatttggtttcagtgaggtgtcttggtgtatgtatgggtgcaaactgagaaacagtcagcaacttgactttttgttttggttaatgcttctccaaggctataagcccgtcttatgcaaggttatgctacatattctctgccgagaaaatcagctagtaactacaaaaaaggaaagtcactgtccctgttaggagagaaacatgctcttcccttatgtcatgaacccaggagtccagttccttccactttccttaggcatgctgcaggctgctcttggagttcctgtccctgagggagggagcaggatatttcaccaacactgaaaggggaaggactatcctggctcccaagttttgtctctgagacagggagcaaactgttaggagctgcagagagagagtgtatgcaattcagttttggcaacataaaaattgctcacttttgactggcaaactatattctgatttaagtcacccggttttgatttggcaaagggatgctaatggaggggtaatagctgggtttatgggaaggatggactggctgagggtgagggtgagggtgagggatgtctgaccaaatgtgttctcatgttgaccttctctgttagggaaggttttacaaataacaaggctctaagtcggtggactcccacagagctttcccaagaagggtctggcccttcgtttattgcttttctttgtgatgtcataccttataaaaggtttcttgtgggagaaactaggcctaagttaggctcaagagatagaacacggtctagataggaggaaagaaaacatccattttataaaaaaacaaaaaaaaacaaaaaaaacgtgatctgagcaggggtggcgcatcctgtcactggggaggcagaggcaggagaatctctgtgaattccaggacagccaggtctacagagcagggtctaagacaggcaatgctgttacacagaaaaaccctgtttatagtccaagaggaaggacaggatgactgcaaagctcatgttatttctaggactgtttttttaaaatgagagtagactatttttattaaaccgtcccttattattttcagaatgaaatcatgtacctattgcatgataatgcatgctaaaatagaataatattctcatggctgggttagattcatccttgggatggagtagatcaatggcccttctctcacatgagtaaataggactcaagaaatgtgtggacaggggataaagtttactggaactattaattaagatgagctagaggaagcagtaaaaaatggtaaaaatagcataactctagtgtgagataggtatacaggaaacttattaattcagcaaatacaattagcaagcccatacttcatgccagacatttttaaaagatacctggaaagtagaggcaaataaaattatgtgtgttcttggtgtttgtgttaaagggggcaataaataacttagcaagtacatagttaatgtaaagtctaattataaagcacacagtaaagggatgggaagaggcagtacatggcaggagcgttttgttttatagaaagtattcagtgcaggcttctccagcagggtgataagtgaatagaggccaaattaagtgagggaaatgtgtctggaggaagagtgatgcagggagagaaagcaacacataagagaggccctgtgacagcaattcttggttgtcaatttgactatatctggaatgaactacagtggaggccacactttggaagacacaaatttgtgtgtggatcttgaggtgggatgacacctgcttttaatccagatcttgagttggggaggcaaatcttccttccttccttttttccttccttccttccttccttccttccttccttccttccttccttccttccttccctcctttttccttccttctttccctccttccttccttccttcctcccacctccctccctctctgtctctctttcttcctttctttcttttgagacagggtttcttttttttctctgcatagcttttggagcctgtcttggaattcactctgtagaccaggctggtcatgaactcacagagatctgcctgttctgcctcccgagtgctgggaataaaggtgtgtgccaagaccactgggctgggaaggcacacctttaatctgggccacaccttctgttggaagcctatataaagacaatcaaagatggaagggtttgttcttcacctgcttgccctcaccttgtcagaacatccattccttcactggccttggagcctacttcttagggactccagacatacacaagaccacccgggactgagaagctactagattcttggaccttctgttcatagcttgccattgttggactgcagccaataaattcctctctctctctctctctctctctctctctctctctctctctctcatctatctatctatctatctatctatctattcattctataatttctgtgactctagagaaccctgactaatacagaccctgatgtagacatgttgacatgtttgagttaccactcaaacatgagtagcaaaaggccagcaatgatgaagggtgatgagagatgagtggtagatgccaatgtggaagaggccagatcatgtgacagtggtagatgccagataaagtgatggctttctaaactgttaaggagtttgtatttaattacattaataaccagggtggggctggagagatggctctgaggttaagagcactctactctcgaagaggaccaggactaggttcccagcactcccactgcagctcacaactgcctgtaactccaattccaggagatctaatgcccctttctgacctccttgggcaccagccatgcatgtggcacacatacatacatacatacagtcaaaacacacagaaaaaataaataaaatcttaaaaattaaccccttcaaccctccccaaagacattggtggcttacacctgcaaacccagcactaaagacactaaggcaggaagactgtgggtttgcagctagcctggctatatatagagttccaggacaacctgagttatagaccaagatccagtctcaaaacaaaacccaaacatacagcattggaagatttcagaataagagtgatatgacaagtttcccatttttaaaagaattattccagctgttccttgaaaatcagtccatagcagggcaaagatgaaagcaagcaggaaactattgctgtggcttaggcatacataattctggctgagaccaagctaaaagatgtgagaaatagttgggtttggaatgtattaagaggttgaagcaagcaacatttgctaatggatcaaatgtggcactgtgggggaaaaaggagtcaagaatgactccaagtttttgaaagacataaacaattaggaaaatggaaatgtcgttaattaaaatgaacactaggaacaaaccatttgggggagaaaatcaagtatttggttttgtgtttttaaattttgaaatacatcctagaaataggataatgtacacaatgttctttaaattacatttattctctgtgtgtgtgtgtgtgtgtgtatgtgagagagagagagagagcgagagagaaagagagagagagaaagaaagagaatgagagagtgagaaagagagagagaaagggagagaaagagagaatgagagagcgagagagaaagagaaagaaagagagagagagagagagagcatgtatgtgccactgtacacatgtgggaagtcagaaaacaacttgtctctcttactatgggggcttcaaggatccagctcgagccatcaggcttggtgccaggcgccttcacaggctgcggcatatctttggtgccacaattttcttcctagccctcttttttgccaacagtgtttcatatacttataagatatctcctttgaggcttggacaagcaaaatatggggaagtaagaaggttcaagaagtttccaagaaataaaataatgaaaattggaagagacagaaaagacggggaggtagagaccagaacctggtcagctgtgggtgacaggtggggatgaaaagaattcacatctgactgggcagtggtggcacacgcctttagtcccagtactcgggaggcagaggcaggtaaatttttgtgattttgaggccagtctggtctacagagctcgttccaggacagcaagtctgttgcatggtgaaaccctgtctcagggaaagaaaaaaaaaaaaaaaaaaaagaagagaagaagaactcacatcttacatccccagcagctcccaatgatgccagggcactgcttctggctttgaaaagttttcttatatccctgccacagatacagtgtcaacatagaaatatttctgctgcaagagtagtggcttgctcagagaaggtttaattttcctacttaacagaaagatgtgggtgtaaggagtacaggttaagatgttatctgtgggtccagaagaccaatatcttcccatcctccttattggcttggttgctcatggctgcaagatggctgctactgatacagacattacatacacggtgcagcctgcaagactgctcgctaaatcacctgcgttgtcaggaaacactttccgagcttttcctggagcccaaactgctcatttagttactcctagctgcaagagggatgtggctacactgttgagcttctttgcctctatagtaaagcatggcactggttgtgaaacagtggtgcttgccatcttgctggtgactgagttctgccagcacatgtcctttcccagagggtggactctactctcggtctatttgaacagtgtccatgaaggcctctccgaggttctttctcttggtgatttaaacacctcaccaactttgtggtcgatgagtgtgcattgctcaatcaactgatttctggacgctcttgatgctgcccttctgagaaagccaactggccgtgtgggaagctggcgtggtcttcaaaccatctctactgcctggtgggagaagggattaaattaggaatgtctccagcagcaaagcatggccataaagccagtaaaccgtcatttgagaatttccaactgtttgccacagggaaaagtgtagacttgtagactgtagtagcttgctaaggggaaaaacacattcaaactccttgaaatgggagggatttgatacttttgaagattttaaagaatggccagttgctggagggaaatgggaagtcaatgaaagagagataatgaggttgaaaggggtgaaaaactagatcctctgcaatagtggtaaagattctggatgtgtagcctaattttattttgctttatttttgattttggagctcaggctggtcttgaatttgcagcagtcctcctgcttcctggctgtcttaatttcgataggacagcactgacagtgtggatcaggtgttcttttcaagaacactttccctgcttcctgtgagatggaccaggaggaatggggaatgaagtgagctcagccaaagggctgttactgaagctgagaagggaaacgaagctgccttgggtgggcccaaaacctcagaggaaagactattatgggttggagatgtattttgggggcagaattggaaggcactggtgctgagttagaccgggaggcaggaagtgggggccatcaacatttgtttgaggctttctggtcagagtttctcatctgatggaggcgtcattttctgaggattgtaagatggccaataggctgggatgggtggaataagtttttccttagggtttgtgcttttgtcctttgttaacacacttatctttcaaaaaacttatcaaaggcctggagagatggccatacagtttacagcactgggggctctttcagaggccctgggttcaagcctaacttcagatccaggggatctgatgccctcttctggcgtctatgggcactacatgcacataatgcacagacataaatgcaggcaaacacccacacccataaaataaaaataagtcacgggtagggggccgtgcaacagggagggaggggatggaggatgagaactcgagggagtgggatggtccagttgggggaggattggagagggagagcaatgaaaggatatcttgatagagagggtcattatgaggttagggagacacctggtgctatggaaatttccaggaatctacaaggatgaccccagctaagactcctagcaatatcagagagggtgcctgaactggcttcctctgtaatcagattgatgactacactaactgtcatcatagaaccttcttccagtgacagatggaagtagatgcagagaaccacagtcaagcactgggttgagctctgggagtccagttgaaaagagggaggaggggttgtatgagcaactcggggtcaggatcatgatggggaaactgacagagacagctgacccaagctcataggagctcacgaactctggattgacagctggggagtctgcgtgggacccaactaggccctctgcatgttggtgacagttgtgtggcttgatctgtttgtggggtccctggcaatgagccaggatctatccttggcgctggagctggctttttggagcccattcctgtgggtcttactcaactttggtgcagtggggtggggcttggtcctgtctcaacttgatgtgccaggctttgttgaggggaggccttgtcctttctgaggaatggatggggggaggaggggagggaggggaaactggttggtatgtaaaatgaatagaaaatttgaaattaaaaagaaactaaaaaaataaaaataaaataattcaatcttaaacatttatcaaagttctatatagcacatttccatctcaaactcaccatgtagcctaagttgtcctcaaatttagtgatgggtcttcctcagcctctccagtgctgggttacagatatgtacctttacatctggcttttcaaatctttttgtttgtttgttttttgttttttgagacagggtttctctgtattgctttggaggctgtcctggaactcgccctgtagaccaggctggcctcaaactcacagagatctgcctgcctttgcctcccgagtgctgggattaaagatgtgcaccaccaacacccggtggcttttcaactctttatgttctcgttcttacactgttttatcttgagcaagttaaccttgctaaaatgtcactgtgaagattaaacatgataacataaagaaagtgccatacagtttccggaataggatagtagatccttgctaagtttcagatttgccattatcatgtgaatttaaacctgtttgcttctacctccttcacaggcctgtgttcccccagcatagtacacttctggatctgagtgggcaaatgcatcttatcacatgactcccctgcttccctagctgtactggtgatgaaaccacttgcagcatacttaaaagccctgaagtttttctagaaatggcagttcaaagttagatttggggccaccaaaacagctggaaatgtttacttttccattttgaacatataatttatagtcagcatgcaattaaatacttggaaagctgtaacgtggcttatttaattaatggcaagcttagacgtggaatgctagcataatgggtcaagaagatggcttctcagtgaaaggtactatttggaaataaattatacattgcattttctcctccagatgaagctgccaccactgagtcttagtttgacccttgcaatgcagtgtggaataagctgcctatactttcccctctggtttcagaaacaaggcaatacacacagaatagctgttggtgtgtgctgtatgccatgacagacactgagttagttttttgtgtatatgagatttgttatcataacaacccagcaaggcatacatcgtctccacttaacagacaaagacactcagcttagtagacatattagcttccatttgactgctgttagccaattataataaacattaaagtggcttaaaatgacaatatattttgttgtagagagcagaagcccagcatcagggtgtcccaagggctgattctttttggaggctcctcttccaccatggggcttttgcatttcttagctcatggctgaatcaccccaatttctgtcttcatctttatttagagtgtagagcaagagtcccaacatcagcagtgcccacaggctagacttacccaccatcccaacatgccaataacagagaggagcaatgaggcctggctttgcatgagtgagggcctaggttcagtcctcagtatgggggaggtggttatgaaaagggagaacagataaaggagtcagtgaccccaggtctgtttggggttatctgcatgagctttaagtttaagtagagaaagaatcgaggtacaaggcaaggagtatggataattaactgtcctggtcaaagtgtcatttggttaatcattgtgtcagctcaggctctgcaaagtcgtcagaagtccttactgcttcggcagtttggtgggatcagtctacttgctacaagatcatcacttctgtgccacagcacaaccttgtcagtgcagataattagcctcatctggggatggggcatagtctgccctgtagagtttagctgttcattatttgtttctgtgccttgtgggggatgagacaggtttgcagacactccttacatgattaacatccctatgcagagggaagcagaggtctggcccaaagtgaaggagaaagtcatgacatgagggcagatgccaggctttcatcctgttttcctttccctggtgagggtcaatgctcctgggcaaagcattgtctaggtgcctcctatacacaccttcatttctcctccttgatgtttgtggagtccactcaccctctgttttaaggacattggtgatgacatttagaccccacctggaaaataaggattatttcctcacttcaagatcctttcttaaaactgggcagtggtggcacatgcctttaatgccagcactgaggcagactgatctcgtgagttcaaggacagcctggtctacagagtgagttccaggacagccaaagctacacaaagagaccttgtctcagaaaaaaaagatcctcagcaatattaggcaacttgcccaaaatgtgtagctgtaagtggcactagtaagaacagatccctgattgcttgactcacagtttgtcctccaagttgccatttgcaagctatctctcctttcaggcagtggtggcaatgagacagatggaataattggcatgtgggactcaccaagccggagggaaggctacatggtttaattccctgataatttcttcaccaagctaatactccagctcaagcctggtttgcttgctcttacactaggaggtgcttttaaaagagtcaagtggcagtagctaggtggggatgctctatgtgggcagcatttagcatttaggggtgctgagtgtcaccacagaagcaccttgtgactgtggtggctataatggcctcacagcatagccatttgttctttctgttcccatattttgttttctaaagaaaaaaattggctcgaaggctagatggcttaatgggactgaagagagattctgtgagggacaaagacaaccagtttctcctcatgcttagtgtggattgtgatttaaaacagattcccatcccttttcattcaagaaggccaaaggtgtcttgtggtctggctatagtcttggtctgttcagcagcagtgacagtataaagtcatacagatctagaacccttttaacatttcaagtcatttgtcacaacttccccaagacatagtttaaaaatccacattgtgaaggaagtgaaaatatgtcaaattataataagaattaggtaacagaattattcaaagggaaatagtttgaaaagttacagctgtcagctttagataatgttaacttaaataatgtgtgtttaaaaacatcctgaaaaaggggcacatatgctatatatattagtatcattaaaaaaaaaaaactacatccactttcttgacaggaatagaaaggtcacattcaagtggaaagtcactgtatatttttggctgggaaaagcagggaagaaaaattacttcctaccattgccaagaactaagtacagttggatcaatcatccctctcctgggtaattcaaatgctcaatctggagagcttgtcagaaaatttggtatacaacttttatcacctggaagctgctgtcaaagatcacacataaagcaaaaaatgaacttgaaagggctgtataaaattttttttaaaggcatagtctcacaatctgacccagactggccttgaactcattaggttggcctcaaattctccatcctcctgcgtgctgggattacatgtgccataacacttggcaattacaaatgcttaatgtttaaacatttatatgatagacaatatttttactatttcattatgaaggctttcaaaattatacacaaaagctaaaaggattggtcaaagtctcttaataaattccaaatgctaaaagaattatatagtgaacatttatacactgatcatttacctcagatgttgacaagctatagtacaggggccaaatctaattgctgggtctattttgtaaataagattttcttggaacacacccatgtcatagtgtatctgtaagcatggtagctcagatggaaaggtatcctggcagctgggagcaaggaataccacaaagtcactgtaagtgtagcagctaacagcccggttccagtgaatgccattgtaacaattccgtccccccgtgggagggttttccagtgaagttgttacagctctgctccagagaactgttacagctctgctctgctgggacaaagcttccccagggaaagtgttacagtggtactccactccagctctcacaaagttgttacagctgggctctgctcaggtgaaaaatgtcacactgtgcaacaaacctcactcaagagatttattgtggaggaagaatccagaagggtggctgcctctagggtgagaagcagcagcaaactgaactgggtacagagcttatatagggtttctcgttgagggtgcagctttcagggtgtcttgggattgatggatttttgtgggctgattatggggcaagctcagggattcgtgggatttcaagtcccagtcctgtggtcaagtcagggtcagagtgtttttcctttacactctatattgtctgttcctttgggcatggcagaagagctgtggtgatctgcagaaaaccctaagcaacagtcatggcaatgaaataaacagaacgatacactactagctaggtctgtggtaataacagtagtaatgagggtgtttgcatggtttgcaggatgctagaatgtataggaggcagaaggctaattggaatttggacttcttggtggtgcagttacccataagtttcccagaaggcttcccaggggtacagctgtctgtgagtggcccatgctccagtaagttctcctaataaatttatctgtctgtctgttcttatgatacaatagcatatctgagtagttcaaacagaaaatataaagcctaaagttcatactaagtaattcttcattacacatccagccatcatcaatctactatgcacttgttagtggagttcagtttcgtatttacccacataatttccaagtgctcataccaggagataaccctgaaacactcagccgatgccaaactctcttgtgtggctcttctgtgacataggatagatggtgtcctatagctactctggcatccatgctcacagtaaaaagtacaaaccagtaagggagtggtcaggcaatacttcttgagagagttagcagaccagatgaggaatcattaatccacaaattcgagatcagcaagctgaaagattctaaactatgtttaccatgatgaagcagataaaggggagccctgtggtcacttgagctgaacataaaagcaaccatcacagcctggagcccaggtgggtgtgtcttcctctgcactttagccttacccacttggcttgagtcacttattcaaccagagtgtggaattcactcaagcagaactgaaggtgaagcctttgaagagagtggagagaggctgttttcggtgctgttaatgcctacagactccttcacaaggaatcacttgtcttttcaaaaaagattgaaggggggcacactaactacaatttaagctcattaagaaggccatctttatctaatagacagcaacactgtctaacccacaatccttcagtgttttagacttaacacttgaaatttgtaggcaaatcccaacacttgtcattccccaatggagttttactgactgcctttgggaggttcttttgggtattaccatgagaaacctcatcttcaggggttgggagtatcctgaagaggctttgtccctttgtccaatggcatcacttctttgaacttggtgagtttcacacttttccaggtgggattcaagggactctctgaaataatccacttggaaaaacttcccacatggttaatactacaagaactaactcagcaccaaacacaacaaaataacaaagcaggaaaagggcaaatttttcaaaaatatttgccagtcattaaagcattcttcatctggtaaaacatgtgatgtgttcatggagttcatcaactgtacccattgtggtccaggttctagaaattgagcgttatacaataacgctccagctttcatggagatcatactgtaattggccagacagaaaagaagtcacataaataagaaaataagaataagaaaaacataaaagtagtaacagtgtgatgtggtatgggtggagatgaagaaaaaaaaaaaaggactgggaagctgatgttttaagtaggatgcttgggaaagtcctcgtagtgacatttgggaaagagctgaaggccacgaaggaagcagccagtgagagtctgagcaaagcatatcctaggcagagaacgtcagagacaagatctgagtacagaaatctctggtggcttaaagaacaccagagaatgcagaagaattctaccctcccctcctgcagcccactgtccaaaggcagcagtcccatttcctctcagtcacccctgttttcaggtctggcggttccttcatgtctctaataggctcatgcagcaccatcttgatccatctgcttcccagggaacctgtcagtctcctgcgtcggatgaggatttagctcacaccattgtgtctccttgccttattcctcccgttggtcgttacacaagcgtttcagttgcagcatcagctagcaatatgtatttaccatagagaggcttttgtttctggtcctgagttttggaatggggaagcacagacagatcacggggctgggcaaaggtcagaagtctgggtgtggcacaaagtccagagagtttggaaggtgcacagagtttaaaagctgacttgtctagatcagcctccgtgggcagagatgatgaaatacccgttccacgtcccaaagtgtaaagcatgggtccctcctggtgtggtggaactgctcttgggaagactagagtttaaggacaacaaacttggacatttagagggactgaggtatcaggttctttcccatgggcagataaaaaaaaaaagaactctcttttctctggcactattctagcccatcgctgggatactgtgtcatacatttccttgtgtgctgtgagaccctacacctatttcctcctcttcagatgtcaaggggatggccacagacttgtttcccaagcctaactggcaccatctggcttctagtcacatttcacccctggggtgtctggaagggaggttgatattttgcctcccatttctctgctgtaggtggtgtcttgagtttccagtcctcctctgataccctggcttctggcttttattaaggtggttgcagctagcagcttgtcactgtgctggctcttcagactctctcagtatccagtgttcacctcccagcttttccaacattttaagtctggttccctacacgaactcacaggtatttaaccattgggcagaggccatgttttctctagtggacactggttaatgcatgctttggtattggagaatttttcctattaaggaaataaacccatgggttcctaatgagagggtgaaaacagtactggatttcagacggattccatattattgtattttttaatcctaaaacttggttttgctccctttcagtgtcttaaggtctccatatgcatctagaatgttcccacaaatctgatcatgagaattcttcaagggtgactgtctcattgagaacacaatcacctctgcctgtcacccaggtccttccctgtccagcacaggctcttctgtaagctcatctcctggcgctgtcccatcccagcgtcccctcctgccaggctgaacttctcacagtcagcttctgtcagcttctgacactgtgtattcatgtgcccacatgttgtgcataaagtgtcttcccctttccctcctctgggttggtccttctccgtttattgtattttatgtgtatggatatttaggctgcttgtatgtctgtgtacaatgtatatgcctggtgcctttggaggccaagagaggccataggattcccctggaacctgagttacagagagctgtgaaccaacacaagggtgctggaaatgaacggaggtcttctggaagagcagccagtacttttaattgctgagccctctcactcacttttaaagactggatcaggcacttttctcttagaaggctttcctacaacacccttctcttcctaccccatcatgttcacacattcattctcttttgggttaaacacttctaggtctgcttagctctgtcataatagatgagattatgctctcagacaatgggtaactattctgtgtacacacaaagtagcctttgaaaacaacagtaagaagcaggagcctcagaattggaaggtctggctggggttgtttataagaaatttgacccaaaaatcaagcctaaagcatttatttttatttttttaaaaaaagatttatttatttactatgtatactgtgttctgtctgcacgtatgcctgcaggccagaagaggcaccagatctcattacagatggttgtgagccacaatgtggttgctggggattgaactcagattctctggaagagcagccagtgctcttaacctctgagtcatctctccagcccaaaaataacttttttgaggcatagtctcactatgttttcctggctgatttatgacttgctatgtagaccaggcaggcctcaaactcatagagtgctgtgattaaaggcatgtccaattgattttaactgattaaaattacattcatccatccatccatctatctatctctctatcttctatcatctatttaatttgtgtgtatgtgtaagagtacatgtaccacattatatttgtggagaccagaggacaacataagagagttggtctcagggattgaactcatatcatcaggctcgacggcaagcaactttgtatgctaacccatctcactgaccctaacattgggtcttaaaagtcatgtgctacgataaatctttccgccataagctgctgagccccaccgccatgtgtatgctttatgccagccgcccgcccgaattaggcccaaataaatacacagaaacttgtattaggtacaatgctgcttggccaatgaccaggattctcatctgttagctcagtctcaattatcatatatctatatattttataagacttatcttatcggacgccttattggcgtccctccttgtcggtggctcacatccagccgctggaggaggagagcgggaaaaagggacccttcctgtttctccttcgcttaaatatgagtctccttgctatgtcacttcctgtctggatcagcacttctctactacatttcccagaatcctctttgactcctagtcccgtctacttgctgtctcattggccaaacagtattttatttaacattgaaaaagataaacatacacagaggtacttcccccatcagtcatgttagtggggtttagtggcctgcaaatgtagtctgagctcctcaagtaagctaaggtgggggattgcttgagcccaggagtttgaagccagccccggaacctagtgttgtattaacagcagcagcaggggcagcaattacaaagattattgactacatgagtcacaagacaatgtaagacagtgagtcagaaaatgaccagactgaggaggacaagttgtttctcctcgctaataatctgtcaaacatggaacactatcatgggtatggataagtgcttggcggaaacttggagttaggctgagatgttactagtcagtgcagtagcagcagggtagagctgattcgccactgggaattgaggaatttggggcagaaggtcaaccatgcaggagtgagtcttgtagacgatggacatgggttttaaatccaaaatgaggaggtggcttttgctccgaggcatgtaattttaaacagttaaaactaatgggagatggagtgcctagctttggataggggttgataggactaatctaactcaggagccagagttcaattccctcacttgtcctgggcagtttatgacactgaaattgatttatttcattagttaaagtgaatgtctggttcctgtaacacaggcatgttacagcaaccttcttaggaaggttgctcttggatggagggaggatgtgggcacacttggcaaagatatcctccaaatgctctaacaaggctggaagcttccaggggaatgaagtggttaagggaaaggagacaccagagagggggtgctctcatgcgaaagcacaattattgagactgagttcagagaggacatgtctttaagccaacaatggaaaagcagaatgaactaataagtaatgttcaaggatatagatacttgtggaccataaaactgaaatggattgtcttatttttatgtacatatttgtgtgagcaggtccgtgtgtgcaggcatgtggagaccagtggatcctttttttgttttgttttgtttttgagacaatgtttctcactatcttggaacacatcacacagtctaggctggctggctgggagccctagggatcctgtctttgcctgtctgttgctagggttataagaatgcatccacctagctttttcacatgggttctggggattaacttgggtccttgtacttccatagcgagtgatttaccaacagcttaccaacaatgctccagccctgaaatgaattattgagtagctttgaggacatttggagtaaaccaccacagagtcaccatcatgaagagttgcttgagttcttctgaaacaagcccacattactcactactcaggaaaatggggcagagagtgcctaagtctggttcctagtcagattctcttcctaagagaactgagtggagaagcaggagaaaccttgcttttctttatagacagggcttttatgtaatgtccatctagcgtacctggagtcttcactgcagtgtctgtaatccctgctgtgtgggaagctgtgtgaggacagagattaattggtttattggtagctggatcctagcatctggcatagtttctgggagacactggaactgtgttaattgaaagttgaaagctgtttgccaaagggtagcaatggcaggggtggggtgggagtggggagtccttcttgcccaatagtcctcccatagagggaaaaaaaatgagtattctggtgttatgttctatgagagcactaatttcatcatgggacacccatcttcatggtatcctctaaccctaatgacctcccaaaggcttcatctccaaatactacattgcgattaaagcttcaacataaatttagggttcaagccatagcaaaacagtcaatgaagttgttggcctgcttccttgaattctttttttacttttcgtatgtctcatgcgtagtcaaatagctcatttgggaaaccctatgaaccaggcacaggctcaggtttagagatcttatcttctttctggccctggggagcaaatgggttggcattatccttagtgtttatgaccccagggtatctgagtaacaaggaagggagaatgaacagatcccaaatcagtttgagcccttctcctgaagaaaagagttgcccttgagaacagactacttgcttgaggcagtggaggcttctagaactcacacttgtcctggatcaagttgcccttgtagcccagctactataagagtccttctgagagctagaaatcaccgtaggcctttaggtcaccaccatggtgatggtagaagatttttagcatcctcatctacagagccaggaggttggacacttattcctctcctgcaggcaccccatgtaggtgaaagccacggtggacatctttcacactgaatgcagctggggtgggtctagcctaaccaaattgcgcccaggtagttgagtgtagctcacagcataagacttggtttgagcaaagttattccttttttagttctgggagcacttgaaagaccctcctgagatgagctggcaggggtcccgcagtttgtgttgggaaacaaggctggcatctgtatatttccttacaggctctcactcaaatgctgagctatctggccatgagcagctcacagatgtggtttgggttccaggttgctcacctgggttcatttctgaggcattaggagacttcatggcctgagtcttcaacatgtttcatctctgaggttctgaatgggaggagacccctgcagagaacacccacagcatcctggcagtgcctttgacctctgcctgtgcccgcctggtgacgcctgtagaataatcccctaacctcttggaactagaaagagagtggtgacacaggggaacatgtagcaaacagttccttctgttacgtagcaggtcttcctagacttaatattctaaggtaggcagtaatatgctccattttaaaggacagaaaattgaggcagagtggctaactgtgcagggcgagctaagtatctcatggtcttcactcctgcactgtaggtactggtagagttgcaccctggctctgctcccactctgacattttcctctctttattgggtcgattgccttgagccgtcttgtacataatcactttcacaggaactctgaaaagtctgcgtttgagcaagtctggacagagctcctggtggatagcttttctctctgggtactgcagaaggtactatgatgaatggtcaggcttggagtcggtctgtagctatagaaaaccctagacccccctatgttaatgctggactagctcaagcctggcgagcgttctccatctcaatttgcctgtgacgtgagatagcaaaggcaccttttcacagcctgtgtgtgaacattagatctacttccagaatgccaggacttttgacctgtttcatgtggtgatgggggtcaaggccagggcctcttgaatgttagggaagtactctcctaactgcaatgcatccccagtcccgggcatgaacacttttagtgatcttgttttatctcacctggtttcctatcaaaacagttctatctttttggcagtgacatgaagagtatttctcttgattaagtactttactagacacaatgtgtggggatcacttcagacacaacagaataataatctatgtgaggcaagaaggtaatctagttcaacaggactcagtagccagggatggttccaacttctggagtctgaccccaggcaacttatttaaagacatgtttaagtactgtacaactttggaaaaaaagtttcctggtggcaattatcccaataaagcttaaggcataaccacatcaaaactcttttgccaagtacatgtgaccttttctataagaatgggttctaccaggtgatggtggtacacatctttaatcccagcacttgggaggtagagacaggaggatctctctgagtttgagaccagcctggtctacacagtgagttctgggacaaccagggctatccagaaatcctgtctggaaaattaacaacaacaacaacaacaacaacaacaacagcaacaacaacaacagagaatgagttctatagtttaagggcctaggggaggatttggacatgtgacatctcccatagagatggggactattgactgagaaacaaagctcaagataaaggcctatggaggaagagtcgggggatctgggtgcagcctggccctgcagacagcactggtcaccatgctgtaaactgcacccacccccagttttctgggcagaaacaggtacacatctcttccactgatgagacaatcctgcatgcttaacatcccttgttttcctagtgtttttctgtgaggacaaggatctcctgccctctataacaatattatggttttaatgttagcaaatatgattttatttattaatttgatgattttattaataattttatttattagtttgatgattttattaataacatctcattattagtgtgtaacacaaaaaataaaagacccagagaccaatattggggttcaagcttcaggctgaagatcagaaaagcaaggaagctggccactagctcttacctctacctcagctcagaccaaagggtgatcctcaaattgctcccaacttcacagctcctcaaattcactcagactgctatgatttcctcagtgtggctagagactcctgagactgggtactgaagagcttgctcctgtcttttttcctctctagtgctggggttaaaggcatgagctctgttactcttttagactgattcactctcatgtagtcctgggtggccttgaactcagatccatctgcctctgtctcctgagtcctgggattaaaggtgtatgccaccattatttgatctctatatcttgtggctgatgttgctttctgaatcctcaggcaaactttaataaatcatatataataagtactacattagtggggttaagcatttcttacacttattcatgacttgtctcttcctgtattgactttgatatttacatatttgtactttcttactaacttataggtttttatatattaagaatattgttgtaaatatttttccagtttcttacttagcccttttaatgatgccattttgaaattagaaatgaaagtgatacacctttttatttttttccttgtgttatatttatataaatcatcttccatctagcaacataaaatttatgcatcttaagttgttttcaatattattcatagacacatacagtttatctgtgcatgaactaaggtgctaagtcaatttttacccaaataggtttttgactctcatgtatttattagttatttttagatttatttttaatttaaattatgtctctctctctctctctctctctctctctctctctctctctctctgtgtgtgtgtgtgtgtgtatgtttgcacttgtgagtgcaggtgcctgtagagttcagaagagggtatcagatgacctgatattggaattacacgtgtttatgagccacccactgtgggtgctgggagccaaactcaggtcctctgggacagcagcaaatgcttttaactgctgatctatctttccagcctcctgtgatgtatttaaacaaaattgtcttcctacttgtttgtgaatatttcttttgtatatggtaaatcagatattggcatacacaacatatataatgacatattttgtctgtttagttgagctgtgatgattcttgtggttggaccatgttgacacgattatgctagcttcataatatgtttgaatggctagtaaggcaagacctataaatacttctatcctaaaattaaaaaaatcaaacaatgtatttatttttatgtgtatgggtgttttgtttacatgtatgtctgtgtatcatgtgtgtgcctggtgctcacagagttcagaagagagtatcagataccctgagattggatttacagatggtagggagtcatcttctgggttctgggaaccaaacccaggtcctttagatgagcagccaggtatcttaactgttgagtcgtctcttgagcccaccttagaagttttgaagcttactttgcctgtgtagtcttctatgtctgccttaaatgtgtttgtccagaagaaaataataggatgcaaataggagaggagctggcatctttatagtaaccagggagagtttacatttcaaaaatcaactgttttacatgtcagttaacagttttttatttatacatttgtacatgagttaatgaagcaatgatttggcttcctgaatttctaaatggtgctggagacaaacatttcattgactataataaatgtcttggagaatgtggtctgggttgcgtcccatgctattctttaaggacttaacttttccagaatttcctgactgatccgtacctcactctgtttatgactcccaagatcaccgttctgctgctcatctcttaattgacatttgtctcagaccccagttccctgaatgttcctggctctctcaatcccaatcccagtagagaacactcttctgattttgtctgcagctctcaagtttggttatacattcatgaactgtttgggtaatattatttcagacttaaccaggccttgaagccatccacatgcattttgttatgtggctgctcagtcactgtgtttggaactcatgggtagacaagaacagaaccacccaaaggagccacaaaaaggaagttgtgactctaaccttttggagtggatgtttcggtgagtgcctgcatttccagtttcttccagtaggaggtgctgatgccttctatttgtgaccttagtgtatcacttggctcagggtagaattaatattcctgccataaaactgagatgaaacagtagaccctccaatgtatataaaacaaaatgaaacaaaacaaagcaacaacaacaaaaccaaacttgtgtcctgattttgttcattgaccattttactatctattctgcaaatgttggcacccaaaagaaataatagttgtgttattcgtagcatgtgctggattctaaatgcataatagatatctcacaagtgagaaaatatattcatttaactaaccaaaaatattataagaaataaagatgcagaggagatgggtcttacatacagataagttattgttgatactggagaaagggagttttgtaagtaccctaagataagggcgtgtgtcagaaacaataacaaactacctgagataggccttacgggagatttatttgggcacttgattttggatgttttgtttatttgtttcaagacagggtttctctgtgtagccccgacactcctggaataaactctgtagaccaggctggcctagatccatctgcctctgtctcctgagttctgggattaaaggcattcattctcatctccaggcagaggaggactttgtctatggaaggcttactccattgtgatcggactgtttggggcagagctccgtggtgatgcaagggcctggtgcagcgtagttgctcatccctaggaagcagagaaagagaataagtcttgaaacaaggtacctttggaagtgatgcccctggtgacccacttcttccaaataggtttcacttaagagcgtgatgacatcaacacacccaagattcaatcatcttcctatagtacttccaactgtgggccattccttcaacgcgggagcctttttttttgggggtaatgtctcatacgtgaaccaacacagtagcggaagaaaagtcctgaaactaagagacccagtgagttcagattactcccaaacagtgtgatgtagcagtttcacggcagaggtaacagatgcattaaggcttccgggatgaggattcaggaaaccaacaggaacaaagcatggtgtgagctgacgaaagtgaagaaaggaggaaataaagctgtgaagatgggcaaaactttgttttagcttttgctttaaacatctgacattgcatagatgtatttgctctgtccaaaaattcttagaaggccagaacaggggttcatgtcaggattgtgctatggatggaagctcctgtcctgtagggaggcagtgtagccctgccccctaggagctaggtacaggtgagcttgactatgcctgtcagtcagggcatggtcaagggaggttcaggatgacgcctggggagcttaagggggcggcagacatgtgggagctgctcagtctggcctccctagcctgctgcctctgggaacgctctggcttatgcttggcctgtgtttatctgaataaagatatcttaacctcatggacttcggattgtcttcgctctcgttatactgtctggcttggtcccacagccatttagttccaaataaatacacagaggcttatattaattataaactgtttggccagtggctcaggcttcttattggctagctctctcttaattattaacccatagctattaatctatgtatttctaaaaggccttctcttaccagagaatgccaggagagtcctatcttcctggtagctacatggcatctccttttggttcctctctgcatcctctccccaaaattctcctctctggtagccccacctatactccctgcctagctactgaccaaccagtgttttattcatcaaccaataagagaaacatctatacagaaagacatccctcatcattgtgcttgagctgtagccggttctccacttctatgtccaggcgccactatgaatggcaaataccagatacatcatcttagctacttagaaacaaaaagcaaagagcagttaaaatctttttccaaacccagaaaatgaatgaaaagaatgccaaaggaaaaatgaccaaattagtgatttgtgatttgtcctttattttgggaatagcccaattgtgtggtacttgaatgacatgaggatagagaccagtcccattcataaactatggtcttcctaattaaatattatattgaaaacagtgtggttaatggcagttcattatagtggctttgtacacatagtttatgtaatcactccattttggagagtcacatgacatatatttctttcttttttcttttcttttcttttcttttcttttcttttcttttcttttctttctctttccttttttttttttttttttttttttgagacagggtttctctgtgtaatagtcctggctgtctgggaacccgctttgtagaccaggctggtatcagactcactgagatcagcctggctccacctctcaagtgctaggattaaaggcaagcaccactgctgcctggctactagacatatttttaagctttctgtttttcattcaatcttaaattctctgtatttggtagtatgagtgagcaaaaataatgaagaaataatggaagcggagaaactaagttggacttggtgagtaggcctgttgagtcaaatgattgatcaggtcagctagaagcacacacacacacaccacaccacacgcacgcgcacgcgcacgcgcacacaccacacgcacacacgcacacactcacacacacacgcacacacactcacacacacacgcacacactcacacacacacacacacacacacacacacacacacacacacacacacacacacacacacacacacacacacacacacacacacacacacacacacacacaccacacacacacacacacacacacaccacacacacacacacaccacacaccacacatcacacacacacacacacacacatacacacacacacaccacacacacacacacacacacacacacaccacacacacacacacacacacacacacacacacacacacacacacacaccacacacacaccacacacacacacacacaccacacacacacacacacacacacacacacacacacacacacacacacacacacacacacacacacacacacacacacacacacacacacacaccacacacacacacacacacgcacacacacacacacacacacacacacgcacacacacacacacacacacacacacacacacacacacacacacgcacacacacacgcacacacacacaccccccccacacgcacacacacacacacgcacgcacgcatgcacacacacacgtaccacacacacacacacacacacacacacacacacacacacacacacacacacacacacacacacacacacacacacacacacacacacacacacacacacacacacacacacacacacacacacacacacacacacacacacacacacacacacacacacacacacacacacacacacacacacacacacacacacacacacacacacacacacacacacacacacacacacacacacacacacacacacacacacacacaccacacaccacacacacacacacacacacacacaccacacacacacaccacacacacacacacacacacacaacacacacacacacacacacacacacacaccacacacacacacacacgcacacacacacacaccacacacacacacacacacacacacacacacgcacacacacacacacacacacaccacacacacacacacacacacacacacacacacacacacacacaccacacacacacacacacacacacacacacacacacacacaccaatgccaggaagaaatgaaagaccttggagttcctgtgattattgtaattactcagttcatattgaaacacagatacatgagataatcatcccttatatcatcaaacaaagtgctccaatgtgtgactgatgaataaatagggcatttatactttgtcacttattatcctgtttcttcttgggaactataaaagggagttaatcttttatatttttttcacttgctcttttttttgctgtaattttgaaaaatcatagaatataacagtaggttatttgatgcatgtattcatttattaattgcatgaatgattattgtgtactaacattaacccaggtgttaagtatgaaatgtacatttacatggtgaaaggagctggagatcacatatcttccagtaaaggtaattaggaagataaatcaatatataagtcataaatcatgctatgtcatgaatgggttgcttcatctgaagcctgggcaaattcagaaaaggaatggaggtccaggaaggtccatggtggtagaacgggcaacttatggctatattgtgtgttgtctgcttcaacatggacttctgttctttggcagtctctaaggatagaggatgatttcttggttgattttcaagagcaggtaggaggagaagtttactggctgcaggtgttcttctcagaaaaacagagaagggatacaataacctcatcctggagaagaactatagtgtgatattgtctttagcaatagaccatgagaagacctatattgtgacatcatccttagcatgtgaaggtcataagatcgatagtgtcccatcatccttagcaagggaagaactatagtgtgatgtcatccttagcaatagatcatgtgtatgagtgcatagaaaggggagatggggctggtgattattttctgtttcctccatggaagctctgggagcccttctgatctcttgtcagcctttagattacacaaaggtaaatgaagttcaaggaaagtattattatgactgaaggattggactattgagaagtttcacagccctgcacaattttgtaaaggaagaatacaattgtgttccctaacaatgggagcttctgctaatacacacagcggttttgtgaaagatagttctaaaaacagtggctgaatcgagctcttcttggtttccagcctctagtacacaatagatgaaagtccaaagttcgaaagtctgtgctgatgtgcccatcaggaaatggtcacagtgattttgatctagattgtatccccaacactccataaatacatatccttatttttaaaagacacaagcattgtattaaatactacagtagaaattttcttgcctggttgtggagatataggcgagatctttggtttttttttgccctttctctgttcttgtggacactttcagccaggtctgattacagctaataaaccaccagatgaactagaattacctttaaagtaaacacaactctttttgttaggcaatctattctgtgggtgactttttaagtgcttaaacaactgagaaatcccagtggtgtccttcttattgcaatatctgcctataatatttatacctaatagtcaaaaggatattaaaccagatcataaggggtagatgacaaacgatgcttaaaggcagtagggatagaccaaggtaaaactggccctggacccattccacctctccacagttaggaagttctagttagtcaagcagtctgagtgtctgtagaatcttgaaaaaatattattattttcatttttatgtatatagatgttttgcctcaatgtctgtctgtgaaccatttgccaatgccagaagagggtgttagatcccacagaattaaagttacagatggttgtgagctgctgtgttatttctgggaattgaatttgggtcctctgcctttaaccactaagtcatctccagtcctatctgtaaaatctgtttttttttttttttttttttttttttgagagagggtttctctgtaactttggagcctgtcctggagctcgctccgtagaccaggctgaccaagaactcacagagatccacctgcctctgcctccagagtgctgggtctaaaggtgtgcgttatcactggcctgccctatctgtagagtctttggcatagatgtattagttacttttctcaacactatgacaaaatgcctgacaaaagcaacttaaggatgagagagtttgttttgcctcatactctcaggaaacaacagtccttcgtggtgggaaaggcatgctggcaggaatatgagtaacatcatgtccttagtcaggaagtagagaagttcaataaacttcctcctttttattcagtctgggacttcatcccatggaatggtgacaaccgcattcagggtgggcctctcaccttagttaagcctctctggaaataccctcactagacacatgaggaggcaggttccctaagggattcccaacccaagtgagttgaaaacaaagattagccattgtgggaggtgtggctttttatgggagcttcagttcatagggttgggtaggatgggcccctcacgatcaccttcagcccctgcctctggtgttcctgttagcacattattttaaggaacggggaaatatcactgttgcccctccttagatttgaaatgccgtgtgaaaggacggagaaggtaccacaattgcacctccttgagattcaaatactgtacaatatggggaaagttggagatagcaggactttgctgagacctgttaagggacagtcatttcctgagaagtaaacatggctgtttttaaagaatactatttattttcttctcattgttttcctcttttgagacagagcgttattctgtaaccctggctggactggaacttactatgtagaacaggcttaccttgaactcacagagatccacctgcctctgtgcatctgtgtactgggattaaaggcatgcactattaggcccaattctcttattcttcttaatttgctgttttaaagtttttaatgatttatttatttttttaaggtacgtttgtgttttgccagcatatatgtatgtgtgagtgtcagattcactggaagtggagttacaggcaattgtaagctgtcatgtgggtactgggagttgaacccaggtttcctggaagaatagccaatgctcttaacctctgagccatctctccagtccctgtgtttcaagatttttagtcaaggatggcaactgggttctgactctggccttgggtgagacatgactgaactggtagaaagccacataccatgatgtagtaggaacatttctggtaaggaacaaaggcgtactttgtcccctctccactcacaaatgggccttcgaatcacctggttggaaaaagggaccctcagggctcctccagagacaatagaaaataatttaaagcctacatgaacgcagaggccagctcagtggtctttctggctgttatccatcttcacgccttgagagtgttttctgtttctctgaaatgaaacttacctgtctggtacactgtgtctagtctgaattcatttgacaaagacaaccaggagcatatggaaggccagagtgagattccaggaacaacgcttgagttcatgtactcactgtgtacctttgagcatcaagaagaatccaagatcatggctggatgggcaaagccagtctactagcatagttggtatctacagaaaatgcacaaggaccacacaacatgctcagggacccatggaaagtgacacagatagatgcatttgcatccggtcgtcaagaatgcataggatttcatcagcaaagagggcaagaagggtgttcttggccaaaggaacagtgaaggtcagggtcatggagtgtcaatgacatgaaaatggctcattgtgagtagaaaatgactggagcagcaggaaataagaccaacaagttagacagtagcttctttgggagggaagtgtggatgtctttaaggaatccggactaaggagtgtgaacttcatctataattttagtttgtgaactttttaactggaatttggatttttaagtggtgagtgatgcaatcaaagccatgctttagagatgtttattaagcatgcttctgggatttggaaacagaaacgcaaattcttggcccagtcctactaagcctgagattctcaggtgggcactgtgatctgtgtttaagaggtactccaggtgatgctgatacctgctaacccttgagagtctctacttaggacagtccctttagtctgtgagagcgtgaactgagggggactcatacaggaaaatgtttccgaagaaaggaggctttcccttggtgacagcaaaagaggagggacttttattgtttatttattagctctagggcaaacattcaaaggtggccaaagtgttggcagattaaacatttattcattttattcattcattccttactcctttgttgctttgttctatccttcattgacaatgataggaacagacattgaactgcgtctcagagacagaaatctggaaaagatgatgtttagctgagactcacacctagcctgttttcacagaataagattccaaatatttcttagacacattctccttagattaaaaaaatatttgtttatgagtgttctgcctgtgtgtatgtctggatactgagggcaagcatgagtgtgagtgtgtgtgtgtgtgtgtgtgtgtgtgtgtgtagtgcttacagaagccagaagagggaatcagatcccttagaatgggagccaccatgtgggtactggcaactgaacttgggttcctgcaagaacaactagtgttcttaactgttgagccacctctccaggccttacccccttttaaaaataacaatcaacaaatatttgagcagttttaagatcttcatttttgagtgagcctgtcaatacccttcatggaacaggaagggattcatggtgtcagagcatagccattggagacaaaattactctgaaaagtcactgtggtcttcatcctccaggaggggtggtctatgtgtgcgtgtgtgcgtgtgtgcacatgtgtgtgttcatttgtcccctgactgctatggatgttattttatggagataaacatggattagtaaagtcagttgagaaatatctagggctttgtcatcacagaatattaagaaccaagctatcgggtggcttagtggttaagagtgtggtgagtggtgcaagtctttaatcccagcacttgggagtcagaggctggcagaagtctatgagttcgaggacagcctggtctacagatagagttctaggatagccaaggctgcacagagaaaccttgtttcacccctaccccccaacaaaaaaccctccaaaacagtacttattgcttttgaagaggacccaagttccattcccactaccaatactatccatatggtagcttacaacaacctgtaactccagtttcaggggatccaatgccctctgctggtctccaagggcttctgcatacatgtggttcacagtaacttacgaagacacacacacacatataaatagaaaagaaataaaatttaaaaatccaagtactctcctctcaaaactgtaagccataggagtcatacggaaaatattcaaaagtggttgttattacaaattaccaggcatgttgttgaagagaggaaagatggcagggtgggtggcctctgggacctgctttcactcctgagttcctgcagcctgtttatcctttcccagctctctcagcgtcactaagccaacatggctttgttcttattggttgactgtagatggtatggctttgttcttattggttgactgtagatggtatggctttgttcttattggttgactgtagatggtatggctttgttcttattggttgactgtagatggtatggctttgttcctattggttgactgtagatggtatggctttgttcttattggttgactgtagatggtatggctttgttcctattggttgactgtagatggtagctcctggaactcccacttcagagcaaaaactcccttctgaggctcccacagcatctggccatggtgtggcccatttttaccaaccacaccgtactgcagtggtttgtgggttttggttgcttctattctgggctctggtgtgtctcatctgtctccatgtccacggttcctaccatgatgtctttcctaggagggttagaaaggatagtttgatatttttattagtgctaattgctcacagtagtttcactttgacttttctacacctgtgcaccatctactttgatcatagtcaacccctcaattcttcattctggtctcccctcttacctcctttctttttggtctcttcgtctaccccaaatagtttttccgctttcgtacttaaacaaaacaaccctcccccccgccaacccaaaataaaaggagattctccacgtgaaagagtgcatgtaatttctgagtctgcttattttgcttaacatggtgatttctagttccatccattttcatgcaaatcacacagtttcatttctcttcatagctgaataattctccacagtgtgtacatactgtgcgttctttgctgtctgttgatagacacttaaggtgattcctcggctgactaatgagaacatagctacagcacatgtgggtgtctagttacttgtgttgtatgctgcctttaatgctcttggatatatatccaggagtgatatagttggagcgtatagttattacagtgtcagtttttttgaagagcctccacactggtttccatagtagctagagtagtttacattcccatagtaggtatgttttgagtaaaaaattccgcccacatatccagctccagctgtacacaagggtcccctctggcatccttgggatcttgtttctaatagattttccagttcaatttccagctcttaagagccatcttttcattttataagtcaattagtgctgacattgggtaacattgcttggtaccttggtgtgtgcctggtactgccctgtgtcacctctcccgtgacagataggccttgatgttgtcagccgttaggaagctcactggtgccttaacttgagaagtctgagatgaggaccagacatggtcaatgaggagcatttccacagcccagagtagacttattcacagtgtcctgaagtcctcatccagagagatactccctggaagagtagtccttgcaaagatgaaaggctggagctaacttctgccaaggcctttgagagactcagaatattaacgaaacatatcgatcctgctttagttcgtaaagttgcagtgggattgagttattaatttattttacaaaaacaattacttcataacatgtggctgagtctgggcccagacacttgcattcaaaccttggtccaggtttagtcagctgtgtgatcttggatgggctacgtgttcttctgtgcttcagtttctaactgataaaatgggcaccatggtacttccttgtcaggttttgtgaagattacacatatcacaggaaagtactttcattagaccattgtgcactgggtgacagtcactgcatcctcatggctgtcactcttctaatggactccaagtgctgctctctggtagtaatgcagaagtaattgaaggttttatctcgagtgtcatttgtctcactcctgtcagggtgtcttgggagctatactcaaggtttcttccgcagataattacaaaattctaaatgaaaggatctgtcaactcatgtgcaggccacacagtgccttggcagtctttgtgagactgaacgcctccactgaaaacccttctgctcattggagaggacctcctagcacccagtgaccatcactcagttttcagactaggtctgtgcccgagcttttacgctgactatggagtaactgagtgcaagagcttcaggcacacaggttgctgtaatcaacaaaccctttggctgaccacaagggttagggctttctttccctttaaatctcagatttttcctgtgtcactgtgtttccagctggcatggcacgcgttccacattgctaatagtctccctctccctggcacaatgcaatgatcccatgtgccagtacttgctgtacccatggaggattgtgctaatctcgatccctaaatatagccgtgactgtcaccgcccaacctgccggtggtgtgagcttgccacctgcataccttaccaacttcacgcgtcacctgataccttcatgctgctgccctagcaagagcttggtatttagaaagaggggtataaaagtgccatgggagctgggcagatgggagccagggtgcaggcaggcaggcagggtgtcctgttccgaggtcacagtaagctttgtgatgaccttggctgccatccttggtcagaattcagataatggtaccaatgtcttgatactcgagatccattctgtattctgcccaatcttggccacattctgggaccaccagttgtgtcttgcctagtcatggtagggtggcagatacaccatgcaggcctggggatggtcattctgtgttttgggcttatgctgctgggtagcatgattgcaaaacctctgcctctcttcacctagtagtggaagaagcaccttcggtggctcagaggcatagaggcacgatgtgcaaatgagaggaagaggcttattttcagcaaagtatttcaaatcattttgatgacaatgaggagacctttaccaaggctttctgggccacctgtgtgcagcaccaagtgctaggaagcacactatttatacccagtgggaccaggcatgggatgcccgttgatttatttctagggcaattattttcctagcttctcttcctacaggaagacattacccatacctgtggcttatttgagtactctgtgtatctaattgtgtgtgtgtgtgtgtgtgtgtgtgtgtgtgtgtgtgtgtgtgtgtgtatgagtgtgtgggggtgtgggaggtgtatgcacttgaacgtgcgcacttgaaagccaaaagccaatcttggatgttgtttctttcagttctggagtccggaagttccaacgttcacttgccactgggtgtttgtttcttccagtcttactgatgtattgctgttttcttactgatatattgctgtacacagcctcttctctgtgaacacttgtggggaataattggcatttgtaacacagaaaataaaagacccagagactgatattggggctcaagcttcaagatgaaggtcagaaaagcaaagcagccaagccaatagctcttatcatgacctcagactgaaagggctgatcctgtctacacgagctctcaccaagcctcagactgctgcctctcctcagtgtggctggagagaatcaatgccttcctagcctcaatgtggctggtgaatgaatgccagctccgagaccctgttcctgtcttaaatacctcttgtgagtgttgggattaaaggtgtgagctcccttactcttttagactgtcaatcttgtgtagccctgggtggccttgaactcagagagatccatctgcctttgtctcctgagtcctgggattaaagctgtgtgccactgctgcctggttcctatggataacgagtgtggctgctttgctattttgatctccagagactttaataaatcataaacaatatatcaccacaggcattctggtatgttttccttattatttattttgactgttgggttttaattgagaaataaaatcacacagttacatatttatcgtgcacaacatgatgtttcagaatatttatatgctatgtgatggctaaattcaccttgtttaagaatgtgttgcctgagataccccttcctgaattagttttctctcttgatccaatgttgcaccattcccctcaagtggaaagtcatggctcccagcctccttccctgtcagcaggccttttatcttttgggtcagggattagatgtcttggttggggggtggtgatgtattagtggatcagaaaactgactcctgccccatccagctcctgtgtggcctggcatcgatgatgtgtatggcatcatatatagtttgtaaaaaacacctttggatcttatcattacaaagcacctcaaccagtccaagaagagagtggggagttctcgttaccgctgttttactggtaaaataatagatctggaagacggccatcttcccacaggttggaataatgaaaggcaaagcagggcttgtctgggttcatgttaacttgacctttactttgccaaatccccttggctgagtggatacaatctatatcaacacagcccagacagaagctcaatggctttgttcagtgaaagtttgacttaatgcgtttatggaaatcacatttgtattgactttacaaatggaagttccattacttttgtagtaacttattattcttgctctataaatgagaaaacacagtttggatagagtgagtgccgtgatcaaggttacatgggtgtcacagttgattgccccggggtttttgtgatggaaccccggtttcctacactcagctcctctctactgtaagaaatgatatgaatcaagttaggtggggttttctaagccttttcccctgagcaatacagacacatgggtttttctcattaggtctgtgggagcaagggctttggagatactttcaagtggctgaggctggggatggctgcatcatgggaaagataggtgaaagcatcaaattctttcttttagtttaaaacaatgcagtggaatattgttatttggggttcatttcccttttaatgggcattttgagtgagcttttgaataagaggccactgcaagaactctgaccactaactaggcttatttaatgtgtgtgtgtgtgtgtgtgtgtgtgtgtgtgtgtgtgtgtgtgtgtgtgtgtgtgtgttatggattgagcccaggtccttgagctttgtaggcaaatactttacaatgcagctagacttctggccctttcttctttctgtgcaattttctgtgggtggtatggctttctgtataacaacattgattcaatttcactgagtgaaatgctgacttagatagggcaagcttagattcaaatttcaccctctaagggctagtcatttcttccctcctgcaaatcccacatttccacatcacaactcttccaaaaagggtatcagttgttaaatcccttctcagatagtctgtctagaactgtggttgccaggggactggaggacttagaatcagtgtcagcagtgcctgggagcttgttagaaacacagtcctcaggtagcccaaagcagtgagattcccaggtaacacacattcatgctaacatttggaagcactgataagggcagtgtattttactaataccatttgccttttgtgcacagatgtaaccaacctcacaaaaaaccttaattttcatctataccagatatgtacagactctcccccttgttactactccctaaagagggcagtaaaacaaccacctacatagcatttagattgcataagctcgtatatgtgcatggcttactctttacttatgtcagcactttctaaacattatgtccttagagaaatcttcaccctctcctcataaaactggcaaggagaaactttgcccaagtccttatagcccctttgcctccttaagttatagcagaacagtcacatttatcttccctctgctccactgtccttgaggatcctgtctcctagagtccctgtcctgccttcagtacttagaaatgcagccaatttttacattacagatagtctttaaatgttttctgaataaatggatcatgaaaaactgcatcttcatgtcatcaagtcaagaattccatgatgctgggtgtgtggggtggctttggacacagccattgaagacagaagaaatgcatggtttagacaactcttctctacctgggagacagtctcacctgttagctgccaggcaaccactgctagcttgtaactaaaagctattaaagcacacttcataaacaagagacaggaccaaacctaaccatatgtttaatgcttattgaccaatagatctgaagcaaaaaaaaaaaaaaaaagtagaggttcagctaatgtccttgtgcaagaaagataacatcacaagataggattcagtttagaatttatggagataaatcataaaacaagaaatgtgaaaacatgtttcttattgcttcatttaaaattagaaatcctcaaaatggaaaatcagtgtgtaaaaagccatccattagattgtgtttctcaaaaaaggtgtggtgtgaaaactagttatgaccagttctgactctaggctgcctttgatcctttaggtaaggtgacagaggccatttgagggcagagctgagtccctgatgatgctctgacatggccagccttggaaagagggtgtgggaacactggttggtgacatcccaaggccagacattcagagaccgtggcctccttttcacaaatgcctaccttaatgcttatcgagtgaaacagtaagcctttcaacttcctagatctcaaacaagtattctctgtaagatagttttaatgtttaatttcagatttggcttatcgtatttgatgtattttgtccttgtgtcaccacaccgtcacaaggttttcttggcatggggatttggagcatgtgcgctgtttgtagactaggatatggtaatgcatgcttgcaggattatgggaaggatgaggtgagctaatgtatacatgtttaggtctcccagttcagggccttcaaaggctgttgttgtacaaagtagaaactgcaaatttcatagtaagactttcaaagatccttggtgacctggcttctctctgctctcctcccttcaccttaattgaatgggttaatgtgagcattctgtattggttcacttttgtgccttgattccatctgccccctgactgacgaaccccgtttcccctctgcccagtcctacccccgctccatggcttgctcacacactttgggagggctttcccattgtctcggccacagctcctctttgcatgttcagatcactctatctggatcttatagaaactctacttttttacttttgttttaccaatatacctgtatattgactgtatctctgtgtgttctaaagaacaagcccaagagtatttcaccttgaatgttcagtcaccttggcattttgttttacccagaatattttataaacaaatggattaaaatggagaatttttatttggtgaagtttaggagctttgggagtcattgtcttgtatttatctacactatatagaattaccttttgttgagtactggctaaagagtgttaaattgctcttctaattgaagatattctattggaacacctcatgggtctcacctagtttagaaaactgtgagctcattatctggagagatgtcaagatgatgggccttgaatcctctctgtagtttcagggctgggtgtctacctggatgtaggtagaactgagtcacggtggttgacagagtagtttgcactctagaattaatgactgatgttcagaatctttggatcctttgttatccagttttccaatgtgtgtttgggattctggacaacagagtgtagtctttgcactgaacgaggccttctggtcttcgaggcccgcttgtcatgaagccttttcatctctgccaggcctcacaggctttgcccgagcaagtctgtagccatctttctgcattactctgattaaattacccgacttaggtaagaggaaagttttattttgatttcgccatttcagagaatgccagtccattaaaatggggatggcacagcagagggcctgtctatgccaggagtgtgagggtggaggctgctcccagtgtggcagtccagaaagcagagcagaactgggactaggggccaagtgtaaccttcaaagacccaccctagtgacctattctttcagctaggccacatctcctgaagcccccgcagacaatgccaccttctggggaacaagcctttaagcctctgagggcatttcagattcagactgtcactaaggctaatgaacaaattctccctggctttgtaggtcattgttgaacagcccatttgttaggaaggtttctcttgtattgaatcaaaatttatttgtgtcttaaattggtgagaaaaggcacttttgccatcaactctcatgacctggattcaatacctagaacccacatgatggaaggagagaagtgatttccacagttatcctctgacctctacacacaagatatggtatacacacacacacacacacacacacacacacacacacacacagacacacactatacaaacaaacaaacacataaataaatgtaaaattatctttatcatctttctcattggtcctatttggagccaaggagaagtttgctgtctaatccattcctgaactctacatattcataaatgtatgccttggggactcatcggctaagctccccagctcccttgacagcgtgtgtaacaatcctttctgacctctttttggatttcctgtttgttaatgatcttcctaaaatgtaggagcagaatgtaccatgctcacctctgtttacaaactatgtttacttccaggaacatttctatagatgcattgaaaatatcatctcacttaatgctccaaacaaccattgtggtgcaggtagttcttactacattgagaaatctgtagcttattaagacattgatggactcaaggtttcacagcagtaagaataaaagtgtatgtggtgatttttctaaagcctacaactctgcatacatgattgcacttattatttaacaatttatttgtaataaatctaatccattaacacagtccctaggtttgaattgaatgtgatatagaaagtctagtgactctacccctggctagtagggccagcaatgtggtctgagcaaatgccaagtgacaattcctcactcctcattgctaagtgactaccttgatggcacatcacaggctctcagtgctcatccaccaagccattgcaagtgattatttgcaacaaataactgttgtggaatggctgggaggagagaacaggcaggtgatttccttgaacggatggtaagttagaacaggttggcttccttgtctattataaaaagacgatacaggctaaccaacactgatgggaagcagagggcagtgacaggattggaaatgccctgcaatgcccattaagaggagggaggaagtctttttaaacacgtgggaaatctagtaaagctttatggaggaggttgcatttgaacaaatcccatgcttttatctcattctctaaagacagtatttcaattggtctttctcatataagagttttatgaaaatcaaataaagcaattcaagggagtttagtataatgcctgtcattcagggagtcatcactaaagttaactatttattattggagaagcagcattagaccagtatccactatagcattctgaagtcatccaggccttgttcaaatccaaccgggtgtaattatgatcacttaatttctctgagcctcagatcaccaagaatggagcgaatgacaatactacttaagtaggtggattatatgagctgatgtagatatcacacaatcatatatttgggaatatatatacagtttatagtttttttttgtctgattggattacttatcttttgagctgagtcttgaaggatgagtaggatttggataagaggcagagcatgttagatagaagataccagcacgaagtatcttgtggtcagtaaagaggtcatttcattgggccatctcaactgcctcagtgatgtgacaaggactgtgtaaccgtggatgccagggtgaagagtctggattctgcttccctggccattgcagtgatgttgggatgtgtttaagattatgctggcttttattgctccctcattcctccaagttctgtattacctttatgcctttggctgcttctccctggactccatgccctctgcctccatcttgcatctctttctttaatattctacagaaaatgttaaaagattgtttcaaacaaaactcaaatgcctacctcacccactaacctcttcaatggttccccatggctcttagggcaacagtgaagtcctcacaatttaaaactttcttctggggctggagagatggctcagaggttaagagcactgactgctcttccagaggtcctgagttcaattcccagcaaccacatggtggctcacaaccatctgctatgagatctgatgtgtgtgcagatatacatggaagcagaatgttgtatacataataaataaataaataaataaaatagaatctttaaaaagataaaatacttaaaaaatatttatttaaaaaaaaactttcttctgtttgatctagcttctcctttatactgggagacagtcagaattcttgcagaaaaagagcaccatcaacatgtgggtgatgacaagattgtggataggattggagagatctgtggtgatatgttatttatgatttattaaagcttgcctgaggattcagaaagcaaagtcagccacaagccgtagaaaccaggcacacagctttaatcccagcggccagaagctaggaggtggaggtacacacctttaatcctaggcctcagaattaagaggtagacagatctctgtgagtccaaggccacccagatctacacaagattgatccagtcttaaagagaaacagctcacacaaagatgatctcagcacctgggatcacacaactttaatcccatcattagatagttatataagacaggagcaaggctcagtatcaggcactcattctccagccacattgaagataggaagacattaaagtctcaggattctccagccacactaaggagaggcagcagtttgaggtttggtggagccagaatcacctatcaatctgaggtatcgtaaaagctagtggtccgatgctttgcttttctgatcttcagcttgaagcttggacctcaatatcagtctctgggttttttatttattgtacaaaacagatctaacaagatctgccgttcttggtgggttaacacaggagctgttgtcacctctagtgctaagggacaagtggaggagccattgcagaggtgttgggctgctctatagagacaatcccttgatggaagccacagcattgagtagaagggagaagccaatcccagctacatgtcaagatggaatcggggaaataaagccttcaatttttctctccgtcccacccttttctctcctgccattgatcaaacccaaccagaaaccaaaggttagaagcatctattgacaaaatctgtgtaagtgaggctccctaggcatgaagtatactgtcaaatggggcaaatgcatttgcaggaccacttagaagtctacaacaggcccttacatggttgttctaagccaccttatattttatgtatgttatttccttgggtcttgcatgattgactctttacctagctgatgcccctttgccatctaatttgaacctgagtatgaagtagtcaagccaggagacttccatgatctttctccatttaggtcatgttcctcaggactccctgtagttgtcttttgactcatgtatggaaatttcatattaaattaactgtatagctacttgcttcatagtctcttttagagaccacaataaataataagaatagaggatacatgtgtgcatatgcccattgggcatgtccgagtggaggtcagatggaaactgtggatatcattctctaggtgaacttgccacagaggccagactggatggctaatgagctccaaggatgtacctgattttgtccccctagttctggcagtctccatgcatgcaaccagggctggcctttcctggcaagcactttaccaactgaggtatttcttagtcctcttctcttctctcctcctccctccttctccttgtcttccgagacagggtcttactctgtatttcagattggcctagaactcactatggtctcagactcacagcaattctcattcttcaatcttctaagtggtgggattacaatcatggtccacggtgcttggctcagaataagggctacataagcaaattttccttgagtgtctatgatgttgaggtattgtgaagtgtaagggatatggaaatgggtgatatttggtgtctgtccttaagagttcatagttaacagaggaagcagttaagtaaaatcatggcatgctacaaaagctattttagttgtctaagcaaattcatctttaaggctcaagggagagaccagggcattctgtttctgtcaccatggattgggggcatttagcagaggatgtttgagctagaccttgaaggatggataaggtgaaggacttcccaggagagggaacatcagataaacaggagaccatagcacaccaaggccagcactcatttgacctgtgtactttctacatttagaggtgtggactatgcaggcctgaaagtcaatggtgatcttacacaagcatcaagttgagggagaaaatggagacactggaagacagaggaagaagagagatttggaaacatgaagaactggagaagttgggcagtagacacaagcagccaagggtcatcagaggatgaagaaggctcttagatacactgagagaattcctgatgaattattgctttacagaaaccaagtctccactgctcccagtcctgagaactagcttgtgacctgaaaacaaatctgccatgtcctaggacagcttgtactttttgctggggctcccgagtctggttcattgggtggttcgattggcactgctttgcggtacttttgaaataacctttcctctgtctgccaaccttatgaggctcactatctttatttaggattttttttttgggggggtggggtgaacatgcctctgtagactgtttctcaaagcatcttttgacaattcatgttcttcccacctgccgattcacagtactctctcagttctatgtcattttctcaattatctgggaggccttgggaagccagtacctatattaaaaattaatgtacccagttcacttggtgggcatgtgtgctagacagacatggtgtctgatactggagatatgaaaatgaatatgcattgttcttgctctcaaggaacatacagtctagcaggggagatggacacaggcagattttttatcaaagctgatgctgtatgaaataataagaaatcctctaggaccttaaggaaaacacagagaaggtcatggagggcttcctgcagaaatgacttctgagattaacctcagaaaagtgaatggggaaaggactctccatgagagggatagtatttgagcatgggtattaagggattgcttgtctatttttggtagatttagattgggatagctactgttggattttgtggtcagagctgtatattggttgtgactcatttgaatgattatgagacaagctagcaggaaggccattcagttcaagtgagagacggggaagagcaaggcaggagaaacaggcaggcttagagacagaatgactatggagagactcacaccccatcctagcaacaatttctgtgaaggacccagataatgaacccatgagattgggtcttgacttcaagttgatttcgtccacttacatcatgtgactcttcacagtaattccgttttaccaagtctcattttccccattgacagaatggcatcgtgagtggtgggttgttttgaaagaaaatgacctccaaagagagtggcactatgaggaggtgtggccttattggagtaagtgtggttttgttggaggtgggctttgagatctcgtgtgtactcaaggtacatcccagtgtcttactcagaccacttcctgttgcctgtgagtcaagatgtaagaactctccttctatagcgccgagtaagccgccaccacagtgaaatgctttcctttgtaggagctgccatggctatggcgtctcttcacagcaatagaagggtttaaatgaagaatcaagggaataaaggctgtaaggacactggaagggctaaccacacacaaaatgttattgctcaagtgctgactctggccactataaactgaaccttgcctttctgtttggattttgcaaaataataagctcttccaatataaaccatggagaagacttgttcagtaaacagtactcaagctttgaatttgggggtggggtgaggtggaagcaagacaagagaaagggatactatccatcttttgttctgagtcaagcaactgtctcttgctcttttttttttttaactgaatgctatttatttttttacttacttatttcttttttaaaattatcttttagttaccatgaaaaataatgggcttcattattgtcagaaataaaatcttgttagtccattttcaaaggtaccatgacaccttgggccgggctatgaatgaataggaaataccagacccttgctaatacctgctagtgttggctgtcaccctaagccaaaatcctacccacaaacatgaagctcagagcagaaggttactaatgttactaacagccaagcttgcctgcaagatcatgtgtctgacagagataaacccacacctgtttttgttgagaaaaagaaaaatgtaagagggaagacaaagatgacgggtaagcttgtacttttctgactacatagcaatgagaaaggaggagggacttgctggcttggggtttaaaatttcttctctgcaaacagctagctgtgcccgccataacagtctgaccccctttttggcaaggctgtaaaattaactgcttcaatggggctcttattatgcagtgagggtcagtgtttctcacaatcaccgcatcttcatacatagatgccattacattttattttcactctccccctgcccttactcttctcctacgccatctacttccagctgttttcctttccactagcgagcatctccttctgctttcctgttgtggattccattgacctctctagttcccaccttccttgaggtctgctccccaattctcagaatcccctttctaatgtcatggcccataaatgaacatacataaatacatgcatatggatacacgtttataatttaaaattcagatgccacatctgaggagaaataggcactgtctgtctttctgagtctagcttattttgcttaacacaatgatctccagttccatccatgttactgcagatctcatgatttcacttcatttgtggcgacataaaattccactgtgtgtatgtactggattttcttcatccgctcatctatttacggacatctagctggctttatttcctgggtatagtacaacaacaaatatgaatgtgcaaatgtctctgtgatatgttgacttagagttttttgggtaaaaaacccaaggatagcatcgtttaatttgaaatgagcattatagcttggcagggtggtgcatgcctgtactcctggcacttgggaggagaagacaggaggatcaggaattcaaggtcattctcagctggatgacaaattctaggccaacctgggcttttgagaccctgtttcagaaagctaaataaacaaatagggcaaaataaagtaaaaatgaacattatattataatcatattgtattatagctagcagcgctgtggaacaaactttgaatgctgtaaatatgtattactctcattggttaataaaaaagttgactgaccaatagctggaaaggtagaggttaggtggaagaaccaaactgagaggacgctgggaagaaggagggcagagtcttgggagtcatgagccagatgtagaagcaacacgggaagttcatagatgaggtaaatgagcctcgggcagcacatagttaaacagaaatgggttaacttaaattgaaagtctccagagctggctggagacaagcctaagctatctgccaagcatttataattaatattaagtcttgccgggtgttggtggcgcatgcctttaatcccagcactcgggaggcagaggcaggtgggtatctgtgagttcgaggccagcctggtctccagagtgaatgccaggataggctccaaaactacacagagaaaccctgtctcaaaaaaccaaaaaaaaaaaaaaaaaaaaaaaaaaaattaagtctctgtgtgggagcagctgctaggacacagagacaaggccacctacatagcagtgatgccctcagatgtgtaagataacctaacatgctggatacataatttgttcttagtgttgtgaattttcttcctattgttctttttcagaatgaaaatcttttttaactaccagttgtttgagctctaggaaatccagaccaaatgtgattttgcttagcagtgtcacttttgactccaggaggtaacttgttttgactagggaagcatttggaagcacttacctttctcttggtggggttcttaaatctctcctaactttattaagtgatttaaaagttttaacagttacagcagggcatggtggggcacacctttaataccagtccttgggaaacagaggctggtgggcttctataagttcaaggccagcctggtctacacagtgcattccaggacagccaaagctatatagagagatcttgtctcagaaaaacaaacaaaaacaaaacaaaacaaaactgtttaacagttgctcattaaaaaaaagccaatacttaagctaatggagtacaaacaacacttggagaaacttggctttgaggagtgtttttaagttttgggtgacattctagaagatttactacacttaaacaaaacaataaagctctagtgcaaatagttgactcagtgggatctggaaaaaatcctttctccaggctcccaagctggaactttccatcacatcctcggcatgctgcagccaggtagaaacagttctctgcctgacacagagctctggcctagactagatctatgcatttcccctaaggcttataaagacaatgtccaattctagttacaaagaaaggagtaaggagctctgaatacgcttggagccagtagttatcagcagttctgtttggctttggagtacgattatgtgagtcatttgtgagcaagagggggcagctcgttaggggatttgggggaggagacggggatcgtttcgtcataattacaggaagtgttgtggtaccttacaagtgagtgggcttgcttctgttaaagcttctttgaaacccttccccagagccaaagttcagcgctgggtccagacatcagggtataaactggaaagtctgtacagtgaacgacatgagcctggtgaacaaagtggcctcgttccacacagagctgctatggctcatgagctgttcatatttaaagcaaagcagcagaattcgatgtcacaaggtgtaaagccttaatgaaaggtgtgaccaaaccagaggtggggatagctgcctagacatagcaaggacaatgtagacaacatcagcccacacaacacagagagagccgagcaaccatgaaggggcttgtctgactcagacgggagggagagactggctatgcacggttgctcctcttgtactaaacagatttaatacttttttttaacctttaaaagacatgattataggttttgtaagtaagtttcattcaagtgtcaggtactttgaccatattaaccccccactctctccttccttcctatccccccagagtctactgatttttaatttaatacattttgatgtttttcacctcccccacttcttccaagctcatcctcacctccctacccacccaactttatgctctttctctctctttttcaaaaacaaaaacccaaaacaccatacataaacaaaactcaaaacaaatgaaaagccccaataaaacaaaaaaaatgcctaaaagcaacaaaaagcctatgaaaaaatatggagctccttttgtgttgaccaactatcactcctgggcatgtggcttgccctggagtgtggttgatatacccagtggcactccattggagaaaattgagtttccttttgccagtgggtatcaattgcaaacagcttcttggtagggtgtacgtggtggtttgaatgtgcatgagaataggctcatgcatttgaaagcctggttccaggttggtgaactattttaggaaggattaggaggtgtggccttgttggaggtgtgtctctggggctgggcttggctcagtcttgcactctatctgcaatttgtggatcaggggtgacctcttagccactgctccagccccatgcctaccagcctgacaccacgcttcctgccatgatgaccatggactcactccctgaaactgtaagccagctcccaattaaatgctttctttcataagttgtcttggtcatgatgtctcctcacagcaataggacagtagctaagacagggtgggatcccatgcccatttcccctccttgaatctgtgcaggccctgagcatgctgccacagtctctcagagttcacatgtgtcagttctgttgtatctagaagacacgatttccttggtgccatccatcccctttggttattactgtctttctgtctcctcctccacatatattgctgagccttgagtggagaggtttgatgaagaccatttaggactgagtgtttcgaaatttcttgttctctgcacattgtcttctgtggttctctgtgttaattcccatctacttctctgatgagaattctcacctaggaactttttttcttctgttttagttttttttttttttttttttttttttttttttttttttttgagataggatctcattatgtagctttggctgtcctggtcactatgtagatcaagctggcctcaaactcacagagatctgcttgcctctgcctctagagtgttggggttaaaggtgtgtgctaccatatccatctagaactttttaaaagagggaaattaacattttttattacaaatttaaataaaacctataattaacaaaataattatacccggcagtggtggcgctcgcctttaactccagcactcaggaggcagaggctggtggatctctgtgagttcgagaccagcctggtctataaagagctagtttcaggacagcctccaaagccacagagaaaccctgtcttgaatcccccaccccaaataattacaatccccagaccagatgtgtgtgtgtgtgtgtgtgtgtgtgtgtgtgtgtgtgtgtgtgtgtgtggtgtggtatgtatgtgtgtgagaacctgaattgaattagggttgcttgaatgagtacaggtgggagataattagtagactacaaacaacttaatgggggctagatcactgacaaaaacaaatcccactcccattcaatacttttccccttgtcccaaagttgtgaattaaagtagaaattctccaaatcatcagcactgcagtgtcccaggtgggtggagccaggccaacagtgtcaaactcacattgaagcttgtttcccatataatggtattgaaatgtgtcaggacctttaagaggttaaacctgatgggaggtgattgggtcatgactgctctctgaaaggacaggggctaagctgatccctagaaggagggtagatttctcaagagagggttagttcttgccagagccggttataaaagagaggagctgatcccccacccccagtgcctcttgtccttccttgctgtgtgttctgttgctgttgtatgttcctgctttctggtctctgtatgctcctacacaggacgccctctgctgtgttgtaatgcagtcaggtagcctttgccagagtcccttggatgctatttgagcttgctggccactagaattaagagccaagtagatctttttttctctatataatatccattatctggcaatttgttgtagaaacacagagcagaccaggacttccttactgacctgtcgttatagatgttgttaggccatcaacccactttaggctcttttccacagagggtgaaagcatttattacacacatctttctaatgtcccctctaaggctggtcagctgtccatttattgaacaattcattcccctttctcctgaagcatatagtaaattctaatatgtaagcatgtctatttatggattctttcctcccactgctaattctgcattcacgtaccaatgtttattttgtaaaactctatagtacaatttaagcagacagagctaatatgccttcttcttattctttttcagaatattgtttgtcctcactttgatttttcttttgatgtttcttgtgaatttggttacactttggctaatttctgttcctttccttgcatggctcttctctttcatcttccaggcagtcagtcacattaaagcctttaaagggctgacaagatgactcggtgagtaaaagcacttccttccaggcctgatgatccaagttttatccctggatctcacataacaggaggagagaaccaactcctgcagggtatcctctgacctccactcaggtgccatggtgtacacacacatacacgcacacgcacacgcacacgcacacgcacacgcacatactcacacgcatgctcataagtaaaaatttaaaagtcttttaaaatgtctttcagcatgattcaattgttacttcttagatttattattattattatttggtttcttgagacagggtttctctgtgtaacagcccttactgtcctggcactcgctctgtagaccaggctgacctccaactcagagatccgcctgcctctgcctcctgagtgctgggattaaaggcttacatcagcatcacctagccccttagatactttttaactcaacactttattcaccttcatccttcagtgaagacagagatatcacagcaatttggagatgtcaccatcaagatgaatgactgcctccttcccagagtcagattgtattttatccatttctcatctcattttgtagcactcagatatctgattttgttcaaaataacccaggagactaaaaaaaaatcatgttattttgttggtggtatgtgcctatagtcttaattacgtgggaaactgaggtacatgactgattgagtacaggagtttgggattatggtgagctatgtctttggggctgttggccatccgtgaactccaggtttaggaagagaccctgtctcaaaaaataaggcagtggtgaggactgagggagacatttaatatttacatacacatgtatacttttacacacatgtgcgcaaacatgaacatgtacacacatatacatatcacacaacacacacacacacacacacacacacacacacacacacacacacgaagaatgatgaaaaagaaaatgagttggtaactgggagaccccagggtgagtttcccacaatggcagttcagctttctgatgacatattgagcaaatgcagtcccacttgtgtaactcaagcacagtcaacagcccttcattcccaggctactttttgagtttaaagtcaaataaagtctggactattctcaaggtcaaaggactatggcttatgactcctggtaacccctagcatggtgctggacacactgcaccacttaaagatccccagtcgacagatttattatgcgaagatgagcaagacaaagcaatgtttgaatgctgccaaaccacacttggagaaaacccacaaataataaaatgcttcataactcctcattcaatccatcttcattgacgcaatacccagctaaaaacaccgactcctttccagtttctccaatcccatcaagaaaggtagtaaaaaacagccaggagcctgagggagaggctcagatcaccaagcttacaggttaccgtgacttctcttgcaagagtcctgttttccctaaaaatttcccttgaagttgaaacagaaagttgctttgacagcattaatcaacaccagggggcaggagagagagctgagttaatagaatttcagaaggacagtgggagcaaaccagctaagtacataaaaaaaaaaccaaacttccagcatggttttggcacctagcatggaggctctccacattacttgaatctcaaatttatttcttaattacagaagtcttctgtgttcattgtaaaaaaaaaaaaattcaaaagctacagagaagcaaaacaaaagcattttagcattcccaaataagcactcgtgttttgcaagagcccatattctagttcccatccacgcacaccataccctcctaagtggagtcataatacattctgatcgtatgctgttccatagcgttagctggtaatgttcactctttacctcaacatgtatggtttgtatagagaaaaagccgcccgagattctaattttggctctgacctaaccagcccttggcaggcagcttggcttctcaggacttagatttcttaactgtgaaatatgaagagtttgatgccaacagcacataaggctcctcctatctctgtccatctcactgacaagtgactaaagaaagacagaatggggcaggcggtagttagcaatcttgcaatcatgcaggttctgatccctgctctactcggaagggcctgggcagggttgttgatctcctaatgagtttcttttctttaagatggtattcatgataggcaacaccacccaggattctgtaaggattaaacagataccacaatgtgcatgacaaggctcaatgagcaatggttgtgatccccatttccctcaggtactaactttgctgaggaggaaagtagaaacaagcacggaccaatcacgtactcacttgagactaatatggaatgaacacgtgaactaggtatggtgctgagatgcacaggttcatttattcctcagaacaaattaatcatctccatgctgtacaccaggaaactgaggttagaacttgcctggattcaggtgaggatcaaaccccaatcattgtctttcaaatggtttgggctgacttgagagggcaacaacaggtaccattatgaacatacttgatttcagaaacagagcccaaggactagggggatgatccagtgttttaagagcacttgctgctcttggggggagacaagggtttggttcccagcacccacatggtggtttacaatcacaagtaacgtcaatgccagggaatccaatgtcttcttctgacatcttcaggcactgtgtgcatacatacatatacatacatacatacatacaggcaaaatactcatatgtataatatgaaagtggatcttttgaaaagcccagtcactattttcctctgtgatgttaagtttgaatttcttaaaaaagaaaagatgcatttttacttttgtgtgtctgtgtgcacatgtgcaggtccagcagaagcctgaaggggtcgtagatcccttggagctagaatgactctgtgtgtgtgtgtgtgtgtgtgtgtgtgtgtgtgtgtgtgtgtgtgtgtgtggtgtgagctgcctcatctgggcgctggaaattgacctctggttctctgaaaaagtagcaaagcattctaatagctgagccctctccagtccagcagcatgcatttttttttttcttcttcattctaactccattgtaacaattcttgtgtttgacaggtaagtgacacaggaaaattgtgttcattctaattggctgctggataaccaagcagagccaggtcatggggctttatgaaaatattttgcacatatatgcatataacaacacttagcaaaaaaggaggccatgagtttgaagaacaaggagggatatataggagtgtttggagagaggaaagggaaaggggaaatgatgtacctaaaatctcagaaaaacaaaagaagaaaatttctacttgactaacaaagttagttttatagtttttaattgtacaactgatttggtccctcaaggtccaaaataaaataaggaaacctcagtgaaagcagctgtcttgggaggtttgtgacatgtagcctgacttttccctcactgcctaaggatgtcggaaccctggcaggggttcgggctgcatgctgcatctgacaatgaacaaggacagtaacttcacgttggtctcttccaaggagaaaacggcacacaaagggtctgcttgcttatttagaggtagagtcttgctaggctgtccaggctggccccctgcctgtcttcagaagtgagggatcacagggccacctcctttcatgggctcacgaggtttcttaacatcccctgcctgttttcagtggctgaatggcgttatttgtggagaaagaaaagtcagccaacttctgtttgcgtgggccaaggagcttggacacacaaagcaaggagcacaagtatttcaaataacacagcaccgggtggagacacaactttctgaactcagatgcaactcggcacagacccacgcataacacataggacccctccaggctcgcacaggccgggagaggccagctgagtatttgctgccgtgcgctacgtgcggcgcgcgcggttctgggaacgcggctgagtcccgctggcccagggttccctgacaccgggctcgccttccagcacgctccgggctcatccagccccgcggtgatcacgttccggggacaggggctcgtggcccagctgcgcgctggttggccctgccgtcgggccgctgattggtccgaggggccagctcacgtggtcgggctctgataagctgcctcccggccccggcggtcagtcggcgggctggaccgtggccctgcatgcactaggtgctggctgtgaagttgcgcggggtgaggttatcgcggtcgccgctgcctctcggcccaatgagctgcaccaggtaggttcagtgcaactctgcgccctaacggaggggaacctgcagctgctgcaggacgttgggcgcggggggcgggggggggaggctcctgtggttttgtcttttctgcagatggagaccccggaggcctggaaggagtggaattgagttgtacttcttagagcttgttttgggagtcagcaccccaaagcagaaactgccttagcgcgagtcagctatggctgggattcccttcttgaagtgactctgttgcctttgagctcaaagacccaagcacttgagggctgcatagtttgcaccctgacattgctgttggggtagtttaggctgtggcagaagttacaggacgattttgcatttattcattcctcccatttgcctatcctggtttgccatagaatactcagtctcaaggtttgagcaaactctcatttttaactcttgcccaattctaaaatttactataaatgcagacgtgaataaacaaataacagctcagcaaaacaaaaacaatgaataacagctcaatcaaccaagcaaccgagaacatcccatgaaatttaattgcgtctccaagtcgtgatgtagtaaaagaattctccctccccaaatcctgcctgttaatggttgttagacaaatacacttagagcttttgtctgtcaggaaaactcctattaaatgagttctgtatacattctttactgtctgtgatgatgaccatttgccagcgggctgtgcttagtgaggctgtgaagagaaattcttcaagccagactatgtctgtctgtctatctatctatcatttatttatgctcaaatataaataccacttgcccaaacagtagaaaacaccaaaggagcacaaaatgggtagattgtgtaattctgtcctgcaaagagaattaacattttagtctttttccctgtgaagtttctcagtatttataaattcttatacctactatgtattttaaaacagtttaattctcagattatcagtttttaaaatacattttattttgcatatataatgtatacagcgggttacaagacaaatataataaagtagttattattgaacagaatgaatatgtctattacctcagcagccagtttttccatttccatgtgaatgtgtcatgagtatccctctgtatccttctatatgaatgtaggttatttaaaggtttttttttttttttcctttagcacatgagatgttggctggtgttgcagttggtcatttctgaaaaattaggatgagcttgataaaatacaaaagtctttctgacttcacataataactacatgacattttaaaaattgcttcatttgtctcttttcaagtggattatgtctccagagaagtaaaaccgatttaagagccagaataagaaacagcagccagaaggagcaagagggtctctgtctgggactgtgattgtggaggagcctgtctggtcaatagacttgaggaagctttaagtacatatttaccttgttggtgccacaccatgaagctccactgatttttttcccctaaagcaaagaaactcctttagtcacattgacctgacaggtagaagaagcactgacccagaacagagcaataatcctcagagctgtgtcagacatcatcaggtccaaccctcttagttttcagatggggaaagtgaactaccctgagtgtttcaggtggtttacacctggtccaatagtctgccaagcacagagctagtctgcagatctagtcacctgcgtgttctcctcgtcttcgtgtgttaacacctccctgattagctgtaactggtgcacatacatgtgggaccagggcaagactaccccagctgttggtgaccacctctcttccttttcctttccagaatgatccatgtgctggatccacgtcctttgacgagttcagtcatgccaatggatgtggccatgagaatttgcttggctcattcaccacccctgaagagtttcctgggtccttacagtgactttcaaagaagaaattttgtgaataaattgaagcctttgaaaccatgtctcaatgtcaagcaggaagccaaatcccagaatgaatggaagcccacaaatgaccaagccaagaagcgggttgtgtttgccgactccaaggggttatcactcactgctatccacgtcttctctgacttcccagaagaacctgcgtgggacctgcagttcgatctcttggaccttaatgatatctcctccagcttaaaacttcatgaagagaaaaatttggttttcgattttccccagccttcatctgattacttaagtttccgggaccgttttcagaagaactttgtctgcctagagaactgctctttgcaagagcggacagtgactgggacagtcaaagtgaaaaatgtgagctttgagaaggaggttcgggtccgaatcacctttgactcctggaaaacctacacagatgtggactgtgtatacatgaagaatgtttacagcagctcggacagcgacaccttctcctttgccatcgacttaccctgtgtcattcccactgaggagaaaattgaattttgtatttcttaccatgctaatgggagggtcttctgggacaacaatgagggtcagaattatagaattgtccatgtacaatggaaacccgatggggttcagacacagatgacaccccaagactgtgcattccaacaggtggcgcctaagactgagttagaacccccagtctttggcagtccgaggcttgctagtggcctcttcccagagtggcagagctgggggagattggataacttggcctcctaccgatgagttagatagcctatagactggctttgtctgatcacaatcctcatgtgattctaggtctgttattgctcaaaattaggaagtcttagttactttccatcagtaggtttaggtatgagctcttggggcctggctatagataatatagtgtcggggtctttgagggtgatgccacccagtcttgttttggaggatcaagtaacagcctgggaactagttttataacagtaacaccttttggggggtgcattcttccacttccctctcagttcactagctttcactttggacaaggaaaggattaaggacagttgatggtgatggaacgctgtggttagggtgtgaggaacgtgcaatgtatacgctaagggctctgaggcttgagccagaggaggcgcaggggggctgatacttaaccgttggtgggaaaactttgttgggcatgtgtttcaaagtgggtttcacaggtttctcctgaggaaataactcaaaagggaaagaggtccattctatgcattcttgcatagaaaaataaagggtgttggatggtactgggggaagacgaactgtggctctgaagaatcaagatcttgagggctagagatgtagcttggttggtagatgtttgcctagcatgcatgaagcaccataaaacgggggatggcaacatacgcctctagtcccatacgttagggtggaggcaggaggatcacaaattcaaggtcatccttgtcacttagaaagttggaggtcagcctgggctgtctcaaggagacaacaagaagaccttaagcgaatcctttcggtttcaacgtggtctatcacaagccatgttttggggagtgtttcaccaaatccagctttgcagtcttaacctgataagtgactttgcggtcgaggcatcattcttgggctcttggtgcagaatgctgcctgacaccagtcatgctgtcaccaatgactagcagtatgtagagactcaacatcagtcatgttaaaggttgacagctctttcggtgccttgattaaaccagaacactgtagtagctgtttaaaccggttacctgaatggccatctaataacaaatgaacttttttggccttatttggaggtccattcgctggcgttctcctaaaatactgttgtattttcgggagcactgtcagtgtacacaaactcacgtccttcatattgaaggtgactcatctctctgccacactttttttgatgtgatgtttgaagtggggactgacaccagagtctcagtgcaagaatccagtacctctcgaatccaagtagcagtctatctcacgcctactttttgtcttgctgttttaatttcaagtcaaagtgctttttaaaaagcagatgtggattattttgaatgtgaactgttttgtatgtacatgaatccattttgtgagatcttgagggcaggtgccctgggatgtttgctgttattgtgcatgttctctggggggtgttaggagagtgcagtggattgtaacacatgtgatctgccatgctgcaaaaacactattggaataactccactctgacagcatttgaggtttggctagcatccataagttctctgctgtaaatatctacactgtcccgcatgagtctcttgctttaagaataaatgtgcttggtagaagaaccgagaatgttttctttccccaaaccataaccagtcaaaccagaggcttagcagttggagtcctcctgtttggcctagcaatgaccaagcagagctggtctggactgggaaatggatccacctgtggatagtcacatgcttcagtctcattagtgaccaaaggtcctacctcctgacagctggggcttggatgcagaggcggtagcttagcagctgtaactgtccctatctgtggttacttctctcccatgctgtcttctgggccaggcttatcttggatggtacctgtcacttttgtaatggggagggaatgatgtcggaagtgttggaatggctcttactttttgagctctagtaccttcctgagggacagaacttggaagtgcagagaggaccccaggaagggcccatgggtgtcagtcttgggctgaagggggaagcgcagctctttacagggagtcaacaggttcttgaacctcagctgcttttccagttttgcctgaaatgtgtataaaattcttcacacagtatttttttttttaaaaaacctctctgatcaatttttttcatacagtatattttgatcatgtttttctctcttgccaaattcctcccagatttccccacctccctacctattcaactttatgttttatctctccccttaaacaacagaaacacccctcccacacaacatggaaatcaaaaccaaccagcaaaagaccaataagatacaaacatgcccaagcaaagcaaaatgagacaaaaagtttacaaaaataccactgagtttgttttgtgttggcctaggaatggagcctcccctgaagtgtggttaatacacccagtgacacgtcattagaggaaactgagttttcctttgcctgtgggtattagctgcagacagcttcttgattaggagtgggagtccatgtcttctcccctctctcagtgctgggacccatctggcttgaacctgtgcaggccttgtgtgtgccatcacagtgaattcatatatacatcaggtcttttgtgtctgaaagaactgcttcctggtgtcctctatcccctctggctcttacaatctttctgcctcctcttctgcaaagctccctgagccctgtgggaagagctttgatgaagacatctcctttaggatagagtgctcccaagtctagcactttgcacattgtcgagttgtggttctctgtttagatactatcttaagtagaaggggtaatcaatgactagccaactaacaatgctgaattacaaagaataaacctttataacatagcatcctctgtctgtatggagggctataaactataagttgaccacgaatgtattttatttggtacacagatttttgttgggttctttttaacagagactgactttatagccttagatggtctgaaattttctatgtagaccaattagtctcaaacttgaatcactctgcctgcttctgcctcctgaatgctgggattacaagtgttcaccagcacacctgacatggatattttaagaaaaatttattgtcaaggcataacaatgagcagacttgtataaaacacacaaatgccagttttttctttaaaaactgcaagctctgtcctcctggcaacaactgtgtggagctgaacagcagccaccccctttagatagggcatgctgcccttaatagggcaagcatggagtgtttgccaaaagcctctacccatggctgtattccggtatactgttggctggtctctgaaggctgtggtcagtgttttgttccttctggttctattcatgataatgattgtgtgaggaacactctcttccaagagatggataaaactcaaattgaggattgaaaaccatgagactcaaatgtaaactttataaaagaaaataagatggggggggggaggctagttctacctgtgccaggctggtcagtggcttttggcctcatgttccttcctgctcttgacgtttcttgaagtgtcccaggagatcctactttttaatagctgggggagctgaaagaaggagctgtttcaaggcagacattcaggcagctcttaactgcctgtgtctgcttcacttggtgttgggacatttgagggctgcctgaggaagaatctagtcaaagaggagtgtgcttctaaggaatgtaattgttcctggttcgtattctgtttggaattctgcctgttaggagaaacagggttgtctttaagattagcacagggggtggttagatgactcagtagttaagagctattcatgcagaagacctgagttcgattcccacacccatgttggttgactcacaactgcctataactccagctccaggggatctgatactctcttctggcctctgtgacatgcattctctctctctctctctctctctctctctctctctctctctcactcacacacacacacacacacacacacacaaataaataaaaatccttataaaaaaagatttaacacgaggagagactggggagatagctcagttgaagtatgtgctgaactagaatgaggacctgagttcagacgcccatatctatgaaaatcaaagatgggcgtggtagcacagtgcttgtaattccagctctggggaagcaaagtcaaagaatccttggggcacctcagccaaatcagtgaactccaaatcagttagaaaccctgtctcaataagcaaggtggagagcaatgaaagaagatacctgatattgacttccggcttccacatgtccatgctcatatatccacacacaatacacagacacacatgcaccacacagacacacacacacaccacacacatacacatgacacacagacatcacacacacaccacacaggcacacacatatgacacatagacatacatacacacatcacacagacacacagacacaccacacacaccacaaacatacacatgacacacagacacacgcaaacacacacacaaaaaacacatgatacagacacataccacacagacacagagacacagacaccacacacacacacacacacacacacacacacacacacacacacacgagatttaacatggaggagaatggcttcttttaagcttggtgaatgcttaactcctccagttttgaagaacaaggtgactaaaatagttcagaggaaacttctagcatttttgtttgtttacttttatttttgagacaaggtctcatgtagcccaggtgtcttcaaactcactatgtagccaaggataatattgaacacccgatcttactccttcgaatgctgagattacaggtatgagctgccatgcctagcttctttactttgtgtgtgtgtgtgtgtgtgtgtgtgtgtgtgtgtgtgtgtatgtatgtatgtgtgttttcccccccaaacaggtgataaaatggaggtccagagataaaaacttgctggaccatgtgaggagagaaggggagggagagcaaggagtcaagagtctggccaagggagtgatgtagccaaagtggctgagttctataggggacagaggagttgaggaaggggcaacctagcccctgagctggagagttcagggtagggggcagtgaatgtcagtcaagaggaccctataacaggtagggatggatggatgctgggagaacctggcagccagatctgctttgatgtgttaatagccattttagtcttagtccagagtttgagagctaacattggggttttatcttatatttgatactctctgaataacttcagaaactgaatgttttgaactgacttgcaaggatgtttgttgtggcttaaataggaaacacactcctgcaaaggctcttgtgttgggcttggtctctggcaggtgggactgtctggcaggcagtagaaacttgagggagatgaggcctaactggaagaaagtggtcactgggtgcccatctttaaaaggggtagtttatctccagccccttcctctgagtgtttctgattgagtcatgtgaggtgaggggtcacctcgaatgagcccctgtgcatgagcctctgtgcatgctcctgtccccatgattcttctgccttccctcaggcacaaaccagccgaatcctgagactgaggcttgagactattgaaactgaaccaaaataaactcttcctcaagtatctcccccctccccagtatttgtcaaagtaacaaaagagctaactagtacagtgttttctaggctgttctaggtagtctcacgagggacattagttcactgtgactaactgtgtaataatcttactcaacatacttttactgaaatcacttgtttatttagcccatgtctccattgcaccgcttagcttttttggtcaatgtgacacaagttagagtcatcctgcaagaaggaagtcaacagagaaatgcctctgtcagattggcctgcaggcaagcctgtgggcattttcttgattgatgatcgaagtggcaggactcaactcactgtggctgccatgcctgggcaagtggtcctggggtttatgaagacagcaggctgagcaagccagtaagcatgggctccacttcagttcctctcttggctttccttagtggactatgacccggaatatgtaaatcaaaccctttcctcctcaagttacttttcctcaaagtgtttttatcacagcaataggaaacaaagaaattcacttctcccatgtgaatttctcctagattcttttgttccttgttttttttttgttcaaattaggaacaagcttgtttcacatgtcaatcccttctccctctccctcccctcacccccatccttcctcccccatccccaacctactccccaccccatccaccctccactccccaggcagggtagggccctcattgggggctccacaaagtccaccacatcatcctgggctgggcctgggcccttccccatgtgtccagggtaagagtgcatcccttcacgtgggatgggctcccaaagtcccctcctacaccaggaaaaatactaatccactaccaaggggcctcctagagtgcagaggcctcctcattgacatccatgttcaggggtctggatcagtcctgtactggcctccccacagcatctggggtcagtgtgctcccccttgttcaggccagctgtttctgtgggtttctccaacctggtcccaacccattcaatcttcattcctccctctcttcagctaagttccagagttcagttcagtgtacatctgtggatgtctgtctctgcttccatcatccactggacgagggctctaggtaggggtcaggtcgtcggagtcttgttcttgttttttaagacagggtttctctgtgtagttttggagcctgtcttggcactaattctgtgtagaccaggctggcctcgaacttgcatagaactgcctgcctctgcctcacaagtactgggattaaaggtatgtgccaccactacctagcattttaaggaaagtgtcatgagaatggccggctgtgttaaaagctgaaggaggactagaattaggattctagtctcaccttttctctctggaaacactctgaagattattttagaatctagagtgtgtttattggcatggccaaagtaatgacatgatgatgaccgtgtaatggcttagggcttgaaaatacaaaatcaagtagaaaaagtatctgttatcctctgcaaaatcttcccaggagaaaacacttgaaatggtttataaaatatttttaaattatatgtttttgtttttaaaagaaatgctgagttgagctgaaagaatgagtgtctctaagaccttctctgccctactgagtaaagatgacacacaggtttctagggaggtaaatgtctattgaagctgccacttacctagaattcatttgctcacctgctgtggattaggctcattgttagtaaaaaactgattggctgatgcagggcaagaagagattggttgagacagcctgttgaagagagaatgatgggaagaggaaggatagagacaggggagtccagacagatgccagccagccctgagcaagcagggcatgtagaaaatgaggtaacaagccatgagccacatggcaaagcataaatagaagtgtgggttaatttaagtgtaagagttagctagtcagcactatttgtaatagccagaaactggaagcaacctagatgcccctcaactgaagaatggatagagaaaatgtggtacattcacacaatggagtactactcagcagaacaaaacaatggatcttgaaatttgcaggaaaatggatggaactagaagaaaccattctgagcgaggtaacccaatcacaaaaagacaaacatggtatgtactcattcatatgtggattttagacatagagtaaagggttaccaacctacaatccacactgccagagaaactagtaaacaaggaggaccctaagagagacatatttggtcccctggagaaggggaaagggtcaaggtcccctgagcaaattgagagcatggaaagaggggggaggcagctaggagaatgagaagggaagaagaggaaggatgcagaggtcatgagggagcagaaaggttgagtcaggggaagaatagaagaaaggacatatgataggtagggttttagttggggggtggtaggggagggggagggggagggagaagggaactgggattgtcatgtaaatcaatcttgtttctaattcaaataaaaaaatactgaaaaaaatagagttagctagtaacaagcctgagctattggtcaagcacttataaataatactaagcctctatgccataatttggaagcagttgccaggacagggagcaaacaatctgctccgtaggtgatcaaatatgcttttttttttaaaaaaaattacatttatttgtttattatttatttatttatttatttatttatttatttactgtgtgtgttgggggatggaatacagggtcttaggcttaaaggcaattgcctttatccactgagtcatctcacaggcccaccaacatgctgtcagacagttgtgtttactctagagtcagaagacaaagggttagaggccattaatgtgctaaaaaaaaaaaaagaatatcaccctttttacatgaaacccaaactaggaaagatgcctgtctcaacattagctctgtaaaaatggaaaaaacaaaacacatagccctcctaacatttattactataactgggccatcccatgaatttgtgatctaaatccacattcctccttgtttgtttgagatggtgccttctgtggcccctgctggctctgacttgctatgtggccaatgattgcaccgtactcctgattgtcttctctcctgattgtctacgaagtgctagggttataggtgtccaccgtgatacctgaatacatattccttatattctgaaaccctcaagcaagaataaaaaaaaaaaaacccaacgatttgatcattttatccagtgtacctatcagtaattcttttaagtgttgctgtattagaggaaataataaatcaccacaaggatagtcattgaataaagctcaaattacaatgaacactgcacagcaagccagggaaaatggaaaaaaatttccagtttttccagatgatttgtatgtacaggcttgaaaaatgttttaaaacggaacacttcatttcttgaaattctgggtaacatgattaattcagtctagggcatacatgaatataatatgctagaatacaggaaataaaaaataataaacccttcaaatttctctatggtaaacgtgattttcctgctcctcctgaggagaggcagaatcacgtctacaacggatagttcaggattcgatgttagaatctgatggatctgatattccaaacctagaactccaggcagccttgcagcccctgtccctctcgtcttctctttttctctcttctctctccctcctctcctttcttcccttctctcctcctcctccttctctctctctctctctctctctctctctctctctctctctctcttcctttcattcttcctaagttaggttgcaaagtaatgggtttcatgatggtattttcatatacatcaagccaagaacttattaaaaaatacttcctgtctgtactgaacactggtgcttcatagaggctcacacacaagctttcactgtacataagcatttaacctgtgccttaagaaatttccaccaattaagaatataggaagatttttctgtctcacctgatagctcccaaatagccacatggagacttgctattatttatgaaagcttagctgatagcttaggcttgattttactagctcttataacttaagccatttctattaatctatgtgctaccctgaggcttgtttacctcatctaccatactgttcatcctgttttcctgcctccactgtgtctccttgcgattctgttattctttatttttaagattttatttatttattatgtatacaacattctgcttccatgtatatctgcgcaccagaagagtgtactggatctcataatggatggttgtgagccaccatgtggttgctgggaactgaactcaggacctttggaagagcagccggtggtcttaacctctgagccatctctccagcccgagatcctgttattcttcccagaattctctctgtcccgaaaatcctgcctagctattggctgttcagctttttattaaaccaatcagactgacacatcttcacagtgtactgtggtaatattttgtttatgatctaacaaataaagcttgcctgaagatcagagtgcaaagctagccgagctagtcagccaaacaggccaggcagtggtggtgcacaccttagatcccagcactagaagagggttataaggggagtggggacaggagtgctgggtattcagtctgcagtcatgctgaagacaggatcaccccagccttggtagaggtcagaactccctagtggttggctgctttggttttctgatcttcagctttaaccccaatatctgtctctgggtttttattattcatgttacagtgtacaaaaagattattccatagcatatgagttcacacgcaaaacaacaaaagggcaaatcctttgtcaggatacataaagattcaaatgagagaacaaaaatgtgaatgcaataagagtttaataattgtggttaatacagaaaaaggtagactgtgaaaaattttattataatgttcatgaaagtttaaagaagacacatttctaagaaagtttgctccaacaaaatcaactgaggaggaaacagggaaatctgatgagacctataggacagtgcttctcaacctgtggagcaaccctttcatgggcgtcacctatcacgtgtctgcatatcagatatttacattaaagtttataacagtagcaaaattacagttatgaagtagcaacaaataattttatggttgggagtcactacaacatgaggaactgtgttaaagggttgcagcattaggaaggttgaaagtcaccgatacagaccgtcgagcttagtattttaagtcgggagttaaaactctacccacaaatgaaatatttggccaagatattttcctgaagtttttccaaaaattcaaagatcaaccatttatctcccacagattttttatataatacttcatattatatgaaaacaatgaatattctccagcctcatgtatacgttaacataacctgaatagtgaagacttccagggacaatataggaagggaaaattataagccaatttcataaggagaggtacatccatagagagaggtagatgtaaaaatttatatacaacaaattattaagatgaatctaaaagtatactggactagatattttctctgaatttgtcaaatgcaaatggagtggacattgttgatgaacgtattgcctgtatatattgcatatacttattgtatatagtttttcttatgttagttgtagccttctttttgtattagacaaaaaaggggatttatggttatatattatttgtgatttattaaagcttgcctgaagactcagaaaacaaagttagccacaagccatagaagccaggcacacacctttaatcctagcagccagaagctaggaggtggtggtacacacctttaatcctaggactcaggattaagaggtagacagatctcagaatccaaggccacccagatctacacaagagtgaaacagtctaaaagagaattatagttcacacctttaatcgcaacattagggaagtatataagacagaagcagggtctcagtagaggattcattctccagccatgctgaggaaaagttacagtctgaggcttggtgagaacttgaggagacaggatcagcccattcagcctgaggtagaggtaagaagctagtggccagctgctttgcttttctgatattcagcttgaagtttgaaccccaatatcaatctgtgggtcttttatttatgatcaagttgaatgaattccaagtgttagtaacttgggggtcacaacctgtgttccaactcaggcctgtccaccctcttcaatcagccaattaaaagagccaaattaaaagtggaaagcagtaaaaggaaattttgtcatgtggccacattgggaagaagaacaaagagatccagcaaagctcacaagtcaaccttcgagatcctgaagtgagagcaagcaaagtataaacagggccaaggatgtgcagatccaagcagtggggtcaaggtgtccccacacatcagtggtccaccgttatctggacttcaatcttatccagtaagttggcctgaaaggttgttggaactgtgtgagatctctttttgggacacagacttcccctctggcatcctttgcttctcatagcatgcatgagtcgtgaagggaagaagaagtctcatccgaaggggaagccagtggtcctggtgaaaagagactggtagtcctactggtagtcctacgttacgagcccacaactctcctgcctcaaatccagcttgctgagaaagcgactgctctggtgaaatgactctacagtgaagaattctcctggttcagatggctatggctagggaccatcttggaaggaaacccattgtctaaaatggaactatccctaggatatggggacgacagctgtaggcagtgtaagggccaggcgctgacaaggcttgacttagacgttgaagtgtgtaggggaagacagccttccctggacacctgggaaccggcctcattatggggtgggagttccctgaacctgaagtcagtgggtagctcaacccgtggagccatctagctgccataaagttcactgctgtttttaaaaagttgggtcagttgaaagaaacaatacatgtgcacatacacacacagacacatacacatcaaataaatgcataattgtcttaagtgtaaatgtcttccactcactagtaaaaaaagttcagactaattgaagtaaagaacaagataaataaagcaagtgccaaggctctagaaccattacaggaaaaagcagagaaacacttcaagacacaagcacaggcagactttctgaatagaactccatttattcaggcagtaatgacaacaaccattggcaaatgtgaaattaaaaacttcttgcataacaaaggaaacaactgagtgaagagacagcatgaggggaatctgctcaatgtattatatatacttacgtgaaaatgtccttatgtaacagtactatgtacagtgaatgtacaattcaggaatttaaatacaagatccagctatctatttgtctccaagaaacaaccccactagttaaaaagacacccacagactgagaggcaaaggatcggagtcaatttattgagccaacaaagaaagccccaaagaaactggaatcactattctaacacctcaaagcaaaaattagaggagttaaagaaagcttccacatagtaatacaggggataattcaccaagaagctatatattttctccctacttcgtaagacaaacactatgtttatattcagtagtattgggtagcttctgtacttcactctcttctttaggtaggtcccccaaactaaaaatcaacaaaaaattggcagaattaaattatatcacagaccgaatggacttaacagatatatacataacattccatccaacagatacagaagacactcctcttagaaaaccatagatactttctaagataggtcacattttagatgactaagccacttcttaaagatttattgatttcattttttatgtgtatgaatgttttgcttgcatgtatgtatgtgagcggcatgcatgcctggtgcccatggatccaaagagggcattgtgtcccttggaactggagtaatgaatggttatctacagtctggctaagcaagtcttaaatacaaagaatcaaaattaatttcttgtatcttaacaaattatactgaaataaagctagaaatcaataacaagagaaattacagaaactatacaatgatctacttttgaatgaatgcttgggacattgaagaaatcacacaggaaattaaaaaaaccctcctacaatcaaatgaaaatagatttatcctttgggatgcagtcaaggaaggaggtttgtagtgatgaatgcttatgttgacaaacagatgtacacacacgcacaacacacacacaacacacacacactcacacactcacacaagctgacaatgaagttctaggtattagaaaaataaggacaagctaaactccaaagcagaaattaagaaattaaaacaaaacaaaacccatataaaatgcacaggggttggaaagacgggtcagtgactgggaccactggttgctctctcttccagaggatctgggttcagtttctagcacccacagggagaattgcaactatctgtaacttcagttccaggagagctggtaccctcttctggccccctggggtgcaaggcatgcctgtggtgcacggagacacatgtaggcaaagcattcatacacctaaaataaagcaataaaaaattttaaaaatagacatatgcagtcaaagagctggttctctgaaaatgtaaacaaaatccacaacaccctagccgatctaaccatctataaccatctaactgggaaaaaacaaaaacaaagccaaaaatagagagagaaagaaaaacctcaaattagtgatggggctggagagatggctcagtggttaagagcacaattagattgaaaatacagccttcataatggaaaaaaagcaatccttgccagctacacatctgacaggagatcaataacaagtatacaccctccttccaatcttaatcatccaatcaatgaatatgttagtgaattgaactgaatagatggttctcagaggaagtaaagcaaatggtcaatagatgtttgaaaaggtttcaacattcctaaccatcaggaaattgcaaattaaaactgctctgagacatatgagtactgcatttatggttctagcagtgtccgaatggaattagcaacgactattggttaacattccagatgatgttgagttttacttaccttttattatttttaactctatgaagtaggtaccagtaacctcatcattttacgagtaagaatgctgaggcacagccgttaaatcacatggccaaggttatgaagatagtttgtaaaggccagacctagatttgacccaagaactgtgattctgcagtgtgggcatttcctaggcccacaagtgtcatgaagggcactaagaatgctgcgttcctgagaacccctagatggtcttcaacatgatgcagcatgaactgagctagcctgactacaattaaccagtctatatcttgtgtcttttgtttgttttccagacagggtttctctgtgtaacaatccgggctgtcttggaactcactttttagaccaggctgacctcgaactcactgagatctgtctgcctctgcctcaccaagtgctgggattaaaggtgggtaccaccatcccccagtttatctccaggtctataaacagaagtctgagttggggaggggttgggggggaggtcctcaaagccctaggttcgagggtaaaggtaagggctccttttccatcgttcaggccaagacaggatgaagagtaccttagaggaaatactatcgtcatatctcctggtggaacatctgccaggtggatggtactgctgttggccccattctaggagaagagcatcggtgaagagagaaggctggtctagaaggctggtgatagacaaggccacttctatggcttggcaggcaggatagctgaattttccattggccaaagggcatgaaggaactactaggactgggtttacttgtctttttccactcaagttatcactctctgtccaaggggctgtctcacagcaggacctgtgaggtgaacaacaggaggcaggagctggggatgaggagagctgcttaagccccacatcctctttgccccttctggctgaccagaaaagcagcagagaggagaggagagagtagatgctgccccaatccatccaccttatcccctctcacagcaagactcagccactgtgcagtctgagggctttaggtaaagtagggtatcagaggaagagtctaactaaactggtctgaactaaacttgagtaactaaaagtagactttgtgtgaaaatattttaaaggcagggagagaggaggaaaatgatttgacatagtacagtcgaggacagcggacaaaaaggaaaactatcttacatctgtgtttgagatgtctctgtgaattggtccgtgtattttcacatgtgctgacatacagagtccctctcccactaacccataaaccgtgagggaaggatctgcctctcttattgacttctctgtcctcaagattcaacacaaggtctgttgtaggaagatttttctgtcctgccagccacacagagacttattattatgaaagctcagctaatagcttaggcttgttactaactagctcttactacttaaattaacccatgtctattaatttgctcctgccttgtggctttattacctttactctgtactgtacagtactttatactgttcttcctccgtgcctggttggtgcctctgcccgtcttccctctttacccggaaaaacttgcttagctattgaccagttcagctttttattaaaccaattagaatagcacatattcacagtgtaccaaagattattccatgacagtctgaaaaaagaatattcattaaaaagcaaagtgaaagactaggcaaggggaggtttgactggttatggatcctggcattccagatgtgtgactagaagcctcccacccctaactccccaccccctgccaccaagatgccaagaggctcttaccacaacctcagtaaaggtctgaagtacagtgtagtcctttggttgtgaagtaaacactgctggccctggaagttctggtaaatactgtagcatcagatcgtcattccttgtctgtgccctgattctcctgcaatgccaggctcttctcctctgtgatctacttcagttccacgggaatctcctggggtcaatacagtcagggcagggtaaggcgatgggtatgttaattagtcttatatggccgttccacagtgtgtatgtacatctgccctgtaaattgtatcctgtaactatatactcttcttgtatgctgattacaagtttaaaaatttaaaagagatgaatgggtaaatgtaacaaaggttacttttttttttttttttggctgttgctgttgttcaaactatgtagccctggttgatcctgaactcacagagatccacctgcttgtacctccagagtgccagtttaccacactgggccatagttgattttttttttttgagtaatacttggaccttctaattgtaaagttaagaacttttggggtttggccccctcagagtttgagactgatgggtaggggctcacgggaggcagaaatcaagtgaagagtacatatggggaaggactgtgtaagccatgaaagagagaggagtgtgagtattcatgggcccacagctgccacactggaagagtgtgtagcgggctgctggcaggctctcgggctcaatgtgtatttatagaaattccttgaggaagagaggaggggagggaacacaaagaatgggcttctgggaaggtgtgtgtggctgaggagggggcacaggttcaggtgtttttttttctggcttccgtttaacacacacttccttcctttttctttgtccctttcttcatcccctcatcccctcctgccagttctgtctggataatttctctgactttgagctatcactctggttcttccgggtatagtctcatccaagcagagccaatcctggcagagacctcactgaagtaatccacagagaacgcttgttctcttctgagggcgaagcaggttaaggagaaagggtggtggtggtggggtgtgtcccccatcccccacccagcccagttccactccatcaagaggtccctttggaccttccctggacgacctccatccttaaaacaggaagcagagcgctgggacttgcttccttgccaataaaaaggagagagtgctgcagtgccttttaaaagcctttggcaagcatggaccggtagtggggagacccagtgacttaaccttctgcgctgtgcttcggacttggccctcgaggactttctctatgaaccttgaagggcaatgagtcaacatggtactacgcgttatgaaccactctcagggtccttttgagaccgtttatagtttacaaggatggactagggccgccaaagaagtctcaagcaagacctctgctctgcccactgtttatgcccaagaccccagtgaataaaaacagaatgggaaagctggaagttgctgcaaatgagcaacctttaagaagtgggctggttgggaatggctcctggagtggggacttagaaggggcggaggtgggaccgatggactggaaaagagatggtacatatggaccatgttcccaagagtccgcgtgacacaggaagcagctgtgactgggaaagcggatttgtagcagagattaaggtttctggctatgaagactgggaggtctcagtctgagctacgactggacgggaaggcataggctgcagaaagcagttcttgttctccagataacagagagactaagtttgccctttcctgtaagtggtgtaatgatcacagaggattagatctgctgtgtggggaatgaggcagccccaggccctgactgagctggtttggggggggggtgggctctgaccagactggcttggctgtagttgtctagttaatgaaaaatggtttgcagcatgtgtaaacgaccggtagggcagagtgggtgcaaacgctctccgcgcctcttagccaacttgagcaaggcatctatgactgtttgcttttcagttgtttgcttcatagctggcagtgatggccaagaattgaaggtcagtgggcaagcttttgatttagctcacccagtgggttttgaatcttcatgggagaccttattctcagaattccaattgctaactaactctttcctgagacaggactcaggaatttacttgatctacttgaagctctgtaacggaacaatgagaatttctgaagagtcaaaacaatgaacgaagaatttgcatttagttcctctattatagacagacatcttccttatggactttccaagtcagatcctacttgctactcaagtgataacttcacccacagttctcctcgaatcaccatctggtgtcctaggtgggtgaggaagggttggtgtgtgtctaaagggtcaatatgtgtgcatttgttcttcccctcccctgacatccagatccaccccctgtctgtctattattagaaaagaaatgtctttcaagagataacaacaaaacataacaaaataagatgaaacaaaaacgatcacattaaacttggacaggagaaaccaacagaaggaaaaaagtccaagagaaggcacaagaatcagagactcgctcgctcacgtattcaggaatcccataaaacactaaaccagaaaaatatgtgtatatgcagaggacctggtgcagacagacccatgtggggcctgtgcatgccgcctcagtctctgtgagttcatacgggctttgatcatgctgacttagaggcttgttttcttatcatcctctattccctctggctcttatagtctttccacttctttcatggagttccctgagctttgaggggagggatttgatggagacatcccatttaggggtgagagttccaagatttctgattctctgtgtaaagtcaggttgtgagtctctgtatttgtttccatctgttgcaggaagcttctctggtgatggctgagcaaggttttgatgtatgagcttagcagaatgtcattaggagtcattttatcactccagtttttcttttcttttctttttttttttgaccggaggtgtttgtttttaccctaggtaaaagtctctagtctctggttcctggtcacctaagcagtattgagtattggttgcatcctgtggagtgggctttatgcaaaatcagatattgattggttaactcccacaagctttgtgtcactaatgtactagcatacctggcaggcaggacagaatgtagatcaaagactttgtggctgtcttcatgtttcttgatgtttacatttctcttttggtagtgtgcagaattcttagcatgctgaaggcactagaatatagaatcccagtgctcttatgacaagatggaagacagagtcaggaaaatcccctgaggcttgcatggccagctaggatgtcatatacacagaaagacagcaaaggaaccctgtctcaagcaagggggaaggaagggttagggttgaggttagggttagggttgttctcagaccttcattagcgttctggggaactggcacacctggacttacacactggaaagcacacacacccacacacctattatacactcacatacccattccctccaacacacaaagataaaaccaaaccaaaccaaaacaaaaccctaaagaaatcaggctggagaaatagcccagtcagtaaagtgtttgccttgcaagcatgaggtcctgagttcagtctccagaaactgtggaaagacagttgggcatgatggcatgtacttgtagtcccagcattgtagagacagtgttaggcagttcatgaggcttactggtcagcaggcctagcctagtggaccaggctaggtcaacgaggtcaggctcaaaaataagatagacagcattcagagtcacacttgaacttggtttccacatgcatgagcaacacccccaagaaaacaacatagaacaaaacaaaacctcaagaagcctagtctatctgaagctggctgtctgaataacccgctgagacattcctgcttgatagaagtgcctagtttctgagtcacagccttaaattttgatcagaagcttaagtgactttttaggttttttaaaaaggaatccaggaaggacatagattttcagaatagtccccactggggcagtaaagcacacataccttcatgagccactggatactgtcaatttatgaagtggcccaggtgtgtgtgaaaggcagggtgtcatatctaaagatggggaaattaaaaaagaattttttttgagccagggtttctctgtgttgccttagctgtcctggaactcgctctgtagatcaggctagctttgaactcacaaaaacatgcctctgcttcccaagagctaggattaaaggtttgcaccactatgcccatctgaaattcaattttttttaatggatccaaattttgttccaataggcttcccatgtgaacattttgagaagtcttaatataaagaaaggaggcaattgcagactttaccaaggtttggtaataataaagataatattgataaaataacactcagataataatcactatatacttagactattccagacactcatctgagccttacataacaacttacctctttaattatcaaaatacataggggaagaggtgttatagctactgttctttcagatgagacgattgatgggtatacatttgttgatggcccacaagtgacacccacacagagttgactggggctgcacacaggagtgaagactccactctctctggccggattttccaatttagaaggaaaactatgaatctggatttttgcacctctatttttgtgtcccatcctggtatttgttgttggcttattgaggaaaatgtacatgtgagaaataggcaccattccctgcaagggctgcctggatgcaatctcagaaaaacagaataaaattacctttgagagagcactttgtatctttatccattaactgaagttcaatttttcaaaggccaccaatgtcactgtgcccagaagtgtcaagtgatccaccagcaggctgtcattcttacctaaatattaaatttggacttgagagctagaagacgttaaggaagtccagaattcattctccacaggcagataacctggaccatatatacagattcaagaggagatggcaacctgtcactctttagttcacaagaacaggaagcagaaatcggagtcaaggtacaaacaagtaatttctctctttaaaaaaaatcagcggaagcagagacccacagctaagcactgagatgaactcctggaatccagttgtagagagggaggagtgatgaacaaaggggtcaagaccagactggagaaacccacagaaatagctgacctgaacaaggcagagctcatggtccccagactgatagctgagaaatcaatgtaggactgacccaggccccctgaacatggatgtcagttaggaggccagggcagtctatggggcttctggtagtggaacagtatttatccctagtgtatgaatggactttgggatcccattctacacagagggatactctctcagcctagatacacaggaaagggtctaggccctgccccaaatgatgtgaccaactttgatgatctcccatggaaggcctcatcctccctagggagcagaaggggaatgggatggggggttggagggggcatgggaggataggagggagagggaactgggattgatatataaaataagattgcttctaatttaaatagaaaaaatctagaaaaaaaattcaagagaggatttctccgtgtagccctggctgtcttgaaactcactctatagaccaggctggcctcaaatttacagagatccacctgcctctgcctcctgagtgtccaccaccactgccctaccaagtgatttctctctagaggcctcgggcttggcaaggatgttgtcaatcagtgtcggagaactgctctgatttcctaaaattttgccaaatgagcaagcagaactcagacatcccagtggccactgtaactctgcttgttctttgactccagtcctgctctctggagtcaagtcctcccaactttgagtcaatgcacagcctgccctgggacccttcggcttgctcttgtctggggcaatctggaactgtgggagaactgagctgctttcagcaacccttttgctgtttagggatgggagaaatcaccaggaagacccgtggctacatttgtgattctcccaaagccctgcttcctgttgggtttcgagtgtgcttgcttttacaggagccagtctgtgtatgctggggtctgataacatctttctgtaggaaagagccacatgggttctgaaatctcacttgtatttggaaatcctcagcagttgtagaagtgtttatatttggggcaagaaagagcaactgagacttggtaaacaagcagatggacatgaaacggttgccgggagaagaattgctgctttgatgaattacagcctgaattggaaaggagaggtcttcattaaacacattggaagtcaagcagcctgggataaggggtctgcagtgagtgccctgagcaaacacagttgcactgtgagctgcaatggatctttccctgaccactaaattatccttcatcaaaatagcacccagcctctgaaagagggttttcatattgaaaagggaatttgcttgcagaacctggttgcatctcttacataattcaggagaatttaccctgctgggctaacattcctggtgtttcagtttaccttgctcagccttaaccagagctagattgatcttgattcttggagaagccacaggattatttccacggttttcatttaaacccaccatctatcttattcttctgacgcatgctttggggagaacagtgcaaccttgtaggagtcatcagcaccgttaggattacaaacagctgtctgtctgtgctcattgtggcttccaattagggatgtgttgaaatggatcaatccaggatctgcaggctccgccgcattcctgtgtgtggtgaattaacaaagcagagggtgtttttcctgcttcagacctatttctgactctggtgtgagtggagtggtaggtggtcatgcctgagaaccgcaggtggtccctgcgtgtgaacgctggctttgtgccagacactgggctagacctcagaggttcccaagtgcctagatcctgccttggtgtgagtgttctcatgataacagtttcattataagtagtacaggtgttatgaggaaaacacattggcgcaagaaagttctggagagacactcactatagttcagggggctcggcagcctgagatcggaaagatctcactgggaggaaccgggtaaacagaagacaagatgggatagaatgtggaattctgaggagagggagggtgagggttgggtgggatgttccatcttaattgttagcaatctttgcagccctggaaggcacttcagttttgtaagcctgccaaattcccactgtcctccatagaccactccaaaagttgccttctttctggttttctctcagccagaacttccctctgtcctgtgagaacttgttttatataaccaacataatattatgaaaaccgtgcctcggagatgcagaatatgattatacagacagggtgtctgaatttaaatcttcgctcaactatttattggctgtgagaccttgggaaagccacttgacatctctgaactccagctttgtcagctgtagaatgggggatatgaaagattccttcctcatagatttcatgcgcgggttgcatagtttacatgcagtgtgccctttccagtgtctggtacacagaggacctttgctactgtttcaccatgtgcagcctcattaacgtaacctatcagctagttataaatacgtctatctccttattggttttgtccatgtgctcagagttggctggagttccatcaggaagccaaaccaagtcatttggttaagagtccatcctggaaaacagggcggcttcaatgccagtgctgctcaaaggctgtgtgcgtgtttaagagtctaggaatcctgtgaagacacagttctgcttcagctggtggaggtgggtctcaagcttctgtgtttccatgaggttccagggtgatgtccgtggaattgctctgtgctgaggaatgggggttcacaccaactcacggaacttttgggaattacctaggctctgtcgggagagccaggagccctaggaagaagggaggcttgctccatgctctgctgtgagcatgggacttcttggtccagtcctctgctgtgagcacaggatttcatggtccagccctctgctctgagcaggggacttcatggtccagtcctctgctgtgagcatgggacttcatggtccagtcctctgctctgagcatgggacttcatggtccagtcctctgctctgagcatgggacttcatggtccagccctctgctctgagcatggaatgtcatggtccctgcttacctgctccagtgcccccagcagtggctactcagttggtgtgaggggactgtcatcagtgcacgaagaatggttcagtccttggggactgcatcaggcagggttctctagagagaaagacagagtggtgtcttggcatactggcaaggccaacaagaattgatactgaaggccttgatctgaacttcttcagtgaggccagtggaccagaaactcagataaaacttcttaaggcagaaattcttttctaggaagtttggatgcttgctattaagtccttccatagattggacgaacccacctacatcagagtggataatctgctttacttgaagtcaagcgatgatgtcagtcactgtggtgctttgaattggaatggtccccataggctcatagatttaaatgcttggtcattagggagtggtgctacttgacagggattaggagatgtggccttgttggagtaggtgtggccttgttggaggaagtgtgtcactaggcatgaactttcttttttctttctttctttcttttttttttgtttttcaagacagggtttctgtgtagctttggagcctatcctggcactggccctggagaccaggctggcctcaaactcacagagatccgccatgaactttcaagtacaagtcagtcctagcgtctctctctctctctctctctcctctctctctcttcctgctgcctgcagatccagacgtagaactctcagctcctctccagcaccatatctgcctgtgtgttgctgtgcttcctgccatgctgatctggagtaaacctttgaaactaaatgtcttcctttatgagagttgccttcacagcaatagaacagtgactaagacggtcacatacacaaaaggctacatagtgatatctgccctagtgattgaccaaacatctgagcagcccagccctgcccagcccagtggacacacaaagggaacaagcataagcaagcacccaaatcatatgacctgcttctggatgacatctttcatctctgccatggcagaatttacctccctcctaggatagaattcatggatctgacagcaccatcttggggtttgatgggtgccattaacatctgatagttaccccaaattctggtgtgtgctgttatagccaccttggccacagttcaccaactctttggttggtgaagtttcccagtgaaaaacagttactccaaatccacagtcaccctccttggagtgcaggactcagatgttgtttacttggggtcacagtaccagaaggggagcagcaggaagttcctgccaggaggtcttggctacctgctaagcctctgctgtgttcttggccaggctgtccagagaacagaggtgaaaatgtgtgtagtccctgggaaaacttcaggatccactagtacctgtgctactttctcaaggcctttccagcctggggtttcatctcatgctcaggatattctggggcataggcaggatagatactgctaacttattttccccgatttggtcaagtggtaccatcttctggtgcaatggcctggggttgaacggtaacaggaaatcgagtgttccatcatggaacctggtggcctggaatggattcctctcatctcttacaagccgagtggccctggataagttgctccactaagtttccatacctacaatgaccccaaaagtttgaaatgaggatcacatacagcatggtttcggtgtctgtcatctactaggtgactagaaactaccatgactgtcttcattactgtagcggacatgccatgaatgctgcatacccacagcaccttctgtagtgactgtctctatccagagtccttgaggagtcaccaggatagatacctcttgtcacagctaattgggtggaggaatgccgcctctggtccagattggccttgggttgctctcctggcaattgaggattggaacatgatgggactgaccttgagtaatggggagctgagctgaaaggctttatgtcctggggaactgaggcagccttgaagattactgtagagaccgaggtggtgaccgggaagcctttagaggcgagaaatggagatgcaagcagaggcagagagaaaagaaacgggacatgtgacccttgaaagatggggcctgttcttgtctttgtggttcccatggggccaggtgactctttctgcccttgaagtcctcttgctgagtcagccttcattttcttaagctcccttgagttggtactcatccttgaaatgagatcagttacaagaatgaagcagatgaagaatggggctgtggagagccaagactcatgtcttgctgccttgcctggcaagggtaggcataatgactacttcctcttaccttggaccattaattcagagtctgaagtgggttggggaaggagatggagcgctaaacctgtctgacattgtcctctagggactcccatgaagctgcccatccttttggctcatgtggtcatgaaggtgccattggtgtcatccttttcacgtgggtacaggttctcagtgaactctgtgtcttcaccgaagctattgtggatgagccttaggacatctggtccaacttggtttctacccattgaaattatctggtgttgggatggagaaatggctcagtggttgagagtgcttgttgctcttggagaggacctgagttcagttcctagcaaccacacagtggctcacaaccattcttaactccagttccaagagacctaatgccttttgacctcctaggataccacacacacacatgatatacatatatacatgtagggaaagtattcaaacacataaactaaatttaaaacattcttttggaaaaaataatctggtttggaagttactttgcctgagcctctgttgctgagtgggaaccaaagcagtataatgtagagctgatcataaaggcaaaaaacgggatcctggactgttgtaactgttgatttgtggtccctttgacctgaaaggggtgtagagtcctggcccatagtgcctcagaatatgacctgacttagatgtacttagccaagacaactcatttggaattgggagggggcttcatctaatataaagagtctttataaaagggggaattcaggcatagatagaagggagagagtgggaagagagaggttaccaggtgacactgaggaccaagagaagctgggacaggtaaggaagcatcccctctcatgtaggtctgggaggagcactgcccacaccttgatttcagggctccagaatagggtgatatcaacttcccatcatcttaaggcaccagtttgtggtactctgtgattacatccctggaaagctaactagaggctctgaactctgtagttgtttcttcttttgttttatttttatttggtgtggtgagacaggatctcacactgtagcccagtcttagccccaaattctctcaggctcttgggtgctgggattgtagacatgaaccaccacacccagttaattattttagtgttttatgtcattccttcgagctgtactgctgcctcttgggtgtgaaatgaagattccagaggcctgggcgttgtttctggggtggggtgtttaacctccattcctctgaggaatgtagcagactctatgaattcaggaagaagctagagccttaatggaggaagtgacaggttactcctgtttatgccaccgtgtgaacctggctagatgcttctgtggcaagtgtctgttactgtttgccgagtccctgaatctcgaatttgtgggtgtaggcagaagtggagcactaatgtctctgtctcaagtaaatttggggagcaatagttaggagatgttgggagcaggatttcggccctcagcactgctcggtttgggtcctgcttacaatgtggttgttggccaactgcccctcccgcagggcctcacccttgcttagaatttacctgcaggacttgctcaaggatggctcatgttgcttgggagcttctgttgcagtaggtctggcaagtggctggagaaatttccaggtgacgaagatgtcaccagcccgtagaccagcactctgaaagtttagtctccttagtctccccaagcctctgttttcctacctgtacaatgggctttatgatgctttccatttgtatagttgtggggctttagtgagtgaaccacaggtaaggcgcttagcgcaccacacttcaggaagctcaggcaacgccagcgagcaaagctttggctgtgattgacacaaacttcagtgtgtttgtaaagtctctcccaggtgttcccaacccgctataggtggttgtggatggtgtgctgagatgatgcctcctcttggagttttctgagaagcagatcttcctccggtaactgtgggatacccactgctgtgcagcagtctccttccccatccaagccagtgcttgagcctggggtgagttcttccctagacgtggtacaagaaggacagcagagactgcccttcgccttaaggctcatcacacagaaagccctctcaccagggctttgtgcacactcctgccatggggacctgtggctggcagccttggctgctccatgacagcactggccgtctgtgcaggaagtgttctcggcctgagccctttcccacactcccagctcaacacagcaattgtctagactcacaagtgtcaagtgccaaggcctttcagaagccgttgcatatgtgtgttctgcatcttctctggttcggggtgagcacagacatacagaccactaatgggttggccctcctaacccaatgtgacatcctggcaccagggctcctcgttagctccatctttgggattctacccttagaagatagacagtccgtgtcaataaatagctccttgtctccaggattctggccccatcagaagcctggggctctgcttggaagctgttgtcttgttgctaagattcttggagccaatccaagctcacatttcccagagtggtagagaatagttaatgaccacaaacctctgaaaatatatactctaggctcagtccaacctcatgaaaaaaaatagtcttagtatctgagagggtgatatttctgtttttgtttgtcttttctgtagctgaactttgagggcagaagtgaaaactttttacggtgtatgttcggtgaaagcttccttcttcagttcagagagctgtctttgagcttttcaccatgtgcaaaatagcaagcaagattcttcctctttagttagagggcatgaagtagacggtataaatatcttgtttctacttttgacatttttttctttgccctaaccacaaatttctctccttaacattcttgtcttgtcttgtttagggccacattgtgaacaatattttaagaaaacttctaataatatattcttggagtcaaagtgtccctgtattgcccctccctgaacctctcccccaattcttatttagctcaacttgctgacttatggtataaattagcattgattttcttgcctgcctggatgtgatctctccctttctagtatgtctacacgatttcaggaattatttatacattctcccccctactctctcactgaaatattgacattctgtgggtagggaccttctcagactagtctgtcttggcagtcaaattcaaaagaccagaatgagtcaggcagtgtcggctcatgtctttaatcccaacccttgggagacagaggcaaacagatctctgagtttaaggccagcctggtctacagagcaagtttcaggacagcaagggctacatggagaaaccctgtctcaataaaacaaaaacacaaaaaacctaagcaaacaaacaaaaaaagacaagaccagaacgaaaccaaggagatatctatatagcatattaatcactaagtgaaaatacatgagaacttagggacaattttagaagcttgatcagtatacttagtacagataaaagcagggcctgcttctggctctacactgtgggaagtcaacttataacttatgcccttactcttacttattacgagtataatgttggataaaagagctttaaaaaaaaaaacagtgtttacagaggtaaacgtgatattcattgtagaacccagcaggcatgtttctggacattcacccaaatgagttgaaactttatgtccacacaaatgtttatggcagctttattcattactgtcttgaactggggagaaaaaccataatatccttcgataagtgggtggctaagtaaaccacaacacttgtagaatgcttttcagcagagaggagaaaagaggtaccaagccccaaggaaacttgagtgcatattgccaagtgaaggaagtcattgtgacggggtacacactctgtgttcccaactatgtgacatcatagagacggtgaagggacagcttcagggttaggggctggccatgaacagggggaaactgaggtgttgcgagagtgcaagtacacactctggcaaagcagaggagaacggatcccagggcaacctgacatcagtgaactgcatcattagcagggattgataggtgactagtgtcccatagcagagcaaggtgttactgtctctccagtgcctagttaactcagcgtgcagactcactgtacaagttacttcattttcttgcttgcctggaactcctttctcttattttgtgtctctgtctgtccgatgctggccagggcctaaatattttttctctggtacttggggttttctcactttgtctgaagctaccttccttgtcatgtgactgcttgccaactcaaaagggcatggatttctctttgtcttttctacaactctttccactcggcagatgctgaaatttataggctgcctgctctgggatttttcttttaaattctaataaaactgtctttgagcttccttttaagtccattcttaaattcttttattaatgatactaagaaggggcctccagtttacctggcaacgtttggtatcctgagcaggacttctccaaatttctgatgacgatatcacacaggtcacacactgaacaggtcacacactacagcaactgttcacaaagagggagagggcattccagtgctgtttatagctcactgcaaggctgaaggagttcttggcaaactcaccaagggtgctgaggaagtacaacctgggaggatgatgcccaagactagggagtccttccatgtcctatgccccgaaaattaatggtgcctggagctcagcagcttttatacatggatgtgtaagtggatgagccttctgctagtgttggtctaacaacaatgccaaagagggggagggtgaaggggggacagggaagggaaaggagggagaggggagagagagatggggaggacagagggggagagggaggagagggagggatggagagagagagagagacagacagagagagagagagagagagagagagagagagagagagagagagagagagagagaggatatatcccccaaggatgcacccctcagtgacctacttcctccaactgggctcggctagggtttctatcacctcccaaaatagtgctgccagctggggaccaagccttcaatgggggatgtcatgggacatttcatattaagttatagcattacctgcttgcccacaatttattctttccaggacctgctctccttttttaaaacagcttaccttggtcacaaaacactttagacattatggaaaacaatctagaaattactcaaaacatgaaaaatagtgctattatttgagctggcagtcccgctgttgggaatatagcatactcccttgggaaacaaagtcaggttgcttaagaggcacattcacactcatgttcattgcagtggctccagacaatgtcacaacggccaagaaatgaatgtagagaaagtgaggtccagaggaacaatggaatactgcttagtttgacaccattctcctatttgcaacaacatagatggaactggaaagcataatgattaaaagaaaaaagaaaaacaaaaacgaaaaccaacaacaacaaaataccctctcaggctcagaaaaacagggtgtatgtatatgatctaacttgtgaaatatagaaaagtgacttcatggagattaagaatagaaagtggctaaggcaaggcaaaggaaggcaaaagagggacatagaggctaagtaactgataaatgtgagatgctattccacagtaggcgatgatagacaataatacactgtatatttttaaaaggccagaaaatgaaaaagaaaaacgataacatgtttgaaaagaaagacatatttactctgatttaaacatacagtgtatacatgtgtctacactgtagcccaccaatatttttaatgtttttgactttggaatacaaaggccccgaactcttgcttggtgcaagagagccttggatttcttgggatgggataaagaggaagcagttggaaaaagaaaatgcctttccccttcctgcctccctccccctctctcttttccctcccatctctccctcccttccttctctcccttcctcctttcttcctcttctcccctcctttctttctttagttcttttcctaaaaatcacccacaaaacctgcggttgggttaatctgccacactgtaattgctactggtgaggaacttagctatctttatttttaaaatgaaaccacttttcttgaagcttatgtcactacacatcacatctgggccctgagctggcagcagataccccgtagcagcaagggctccagacagtgtcatttcatcgatttagagacgaatccaaagtcagcagagaagatgaaaaccacatgcagtccaatttgccccagttacaggggagtaactgcttgaagacttgcacttggcccatcacagagatcatcacacagcagtccattgtctgctctttctttgggtgagtgccagatgagtcattggtttgcatttcaaggttacagccgatgaaaaacacttatctgtaagcacaatgatgaccttcaatggcacctgaggctctaagagggatgctagtgggcctgtttcagtgacagttgatttcttgcattcactcaggcatgtgttatggagcaccacacacacaaggggttgaaggcactgttttaatttttctctttcttctttgaccctttctgactccatctcactctcccaaacacacatagtttgcttggaatatgagggactcttgtatgtgttataaacacttgcctgtgccagggcttggaggattgaaccaggctcactatcagtagtctcatcattctcctggcattctttaggcttccatcttggactgccccattggctctgactggtatttttgtttggttttaacttctttttgtttctaaaccggatgacatagctttttcactaatttgacattagtcatggctttaggtgatttgatcttggctcagtctccctgtgagactgtgccttgttgcctaagggttggtggtgacggctggaagggtaccttactttcctgtgatggaatgcaccccgagacctgtctgtccaatcttctaggtctattgtcattcaccttttaggagactgaaatttgtgcatatatttaaagttcctgactcaggaccagcccttctctgatgagtaccatttgtgaggtccatttttcacgatatttccagaattgtaagtgataaaccgaatagcttcgtgcccgttgctccttctaagctgggagtacaggggagtgggggaaggctttacacaaaaacaggaaatgttgaaatatcagtcctgcctctgtgagacccagcacaaattcattagtctctatggtatttctaaagacaccctcactgcaagggaagacttgagtcacctccccaagggttgttataaggaatagagttatacaaaaacgcccaggacatatcacttacaactgccacagccactggaagcaaggatgtgttggggggaaatcaaggtaacttcttcaacttggcaatgagaagtgatttgcctttttgtatggctcatgccattttgccttagccagagcacagtggaggagatggtgcctgttctgacacgtggtgctagatttgggcgagcccgtggtctctcagtcacagttttcttgattataaagtgaatgtaacaatacttactgcttatgatttggggagagaataagattcagtagtcagtgcagtgtctggctcaaatgattacctgctatggagtacacatactctctcttctcttagaccacatgttctgtgtaggcagaaatgcttccaggtgactgttggcccagggactggcaggaagccgggcctcagcagttagtgaagagggaagcgtttccctttttttcctggttctcagcagatcccatttgaagactataaattaaggtcccacagcaatttagaagataaacaatcccagaataggctcctacagcattaaataaggcaatttaaaaatgggtcactgtgggaaaaaaaaaaaaaaacagaaacaaaaacaaaaacctcaactgtgttctataaaggaggctcctggggctcagttcacatgagaaggcagctctgggaaggtgtactagggatttcagatcaaaggcaagtacgtttgtagaaaaaaagtattgcatgcaatttgctaattaaaaaaattagctccctataaaagttactgtgggactcggttaacccttttctaaagcttgaggactgggttgcatccacggggcctcacaggcttggataaatgctctggcattttcataaacagagagaagccactggcattttaagccagagtgaacctggatccgatttgattgaaacgcttaggttttacaaagttttcattttactatcattttcccttcatacacaatacactttctttgaccaaatccacacttcatatcctcccactaaatgccccagggtccctcatctacccctccccagcttattttcccctctctttctctggactaagtcttgttagtgttgctcgcataatgcatgtgggtgtaggactgtctactgaagcatgaacaacctaccaagcccctgcccccaccccgccactgcacgcttctgaagaaaactgcccccctccactccagattgttttctctctttccctgctgccctaggctgttcctccggccttcatgcgtgttgagcattatctggtcagcttctccttcgccccctctccaatcattccagtctacagcaattgtctcttcctctttgttcccagcatttgctggaatcttcacactctgcctcatgacatctaatgctattcttaccttctgcgtgttagtgaatgaattaacccagcaagcacttcctgacagctgtgacaatgacttgtcaagcactgcgctggggactaggggtggggataatggaggcaggtgccctactcctgtagctaaagtctgggcttgagaaagacctaaagcaaccttgagtcagtgtgggaagcccagggataagcaccgctccagttttcaacaggcctctaatcaatgggcgaggagggatgggtgggaaggttaggggcaatttctgggtgaaaggaattggattcttcaaaggctgactagggatgatgaagggatggggtgcttaggaagcagactgagcaaagcagcaggcaggactggtgagaaaaggctttcagttcgtggcagctagatgaaggttgagatgagtagagacatggctaaacaggcaaggaggagcacaacacaacacaacaaaccaaagtgtgcctttttctttctaggagaaattctcaatctgaattgggaaaaaggcccagggtggtccataggaggccagaaggggtgtttcctgactctcttgctgagacagggacttgagggtaccacagcaagtgtcagcttttgaggagactatggaagactaactcatagccagcttagtaatgcagtgtgacacagacaaggtgttgtggggcccttgggaaagacccctgagcccacctcagggccagagaaggtttcttggaggtgatgttctccaagagccatcctgactgttggaccttataacgggttggtggtggcagtggtggcagtggtggcagtggtggcagtggtggcgaggatttggaagaaatagggagtaagaaagccaatgtgtagagagatctcttgcatgctactttcctgagcttccgctttccaggcccaagaaacaaagctacagacctgagatcccagggacttcaaagtaggccaggggacagcctgaagagagatcctggctatttgggggccttcagcctctcttggaatatgggcctgttttgcaaacatagcaatgtgggccaagtacgtgaggtttggcactggttgggccgacccagctcactaagcaaatagtgggggagtttcttcccctttcctttgtaaactaaatcttctctgggcgcataatttataggattccagagaactccattttggctttcttcccaagaaagaaaaacatctcacattttccatgcactctccctagcctgctggcctagagctaagatttcccactgagactaaggacaggactgctgctgttcagggctaaggcagtgtttgggggtggagagctgtactgctgccccagagatagctgcagcacatggtaggtaaggattcgtcacaagagtggggagtggaaaatagatatgtaggggttcaggcaagtgactatgcagacagaagatctgctaggagctgtgctgggagtctccctcactcccagctctccatggttccttaatgtttaccaagcacgttctcatctcatttattttacctccccaccctgtatgcaccagaagggaaggactcacatgaccagggttcccatttaactgctcaactctatctgagttgctaggggaatggaacaacaacttgaaatcattagctgccttgagatagagtccctagttggaaaacttctaggcctcatgtggtaagcctgatggggatgcttccctgagggccccagggatgtttgtgtgaacaatctccaccatgcttagccctcagcacggtgtggctatggagtgatcagagtcgtgactcctacacgctctgctgggactgtgagctgagtattttgactacggtcacagcctttagattgtgtccatcactctgtgcctgtcaggctagcccaccctgtgcagatgctgccaggtaaggctgcctatgtgtgctgggcttagagatctggggttgcctgtaagtctggaagggcaatctttaaatccaaattcctgccctgctttgtgtgagcaaacaactctagaaactgcacagttggtgaaacttaagctttagaatatgaaccttcattctcaggcgtctgtttcctcttatagtcaagggcgagcatccaaatcgcacttcatttatcattgtcattgctgctctgaaaggtcagcgtacattcctctttgcctccagaaacttggctctgagaatgattagattcaaagaactgggcctcaaatgcatgcagtaggcactcactaatggtgtgtgcatacagtaggcactcactaatgtttgtatgcatatagtagggactcactaatgtttgtatgcatatagtagggactcactaatgtttgtggacaaggaatcaggttgtgttccataacaaggttggaggtgaggtccttgtcctcacagtacaaagacagcatgtccctttgtcagccagttcaacggcccccatgttacagccctgacggtttccccagtgaaaattctacaaacttattgcaaaatttcttctgccgtcttcctctcaaacagtagctggccctttctcttcacccaattctcaaactgattgttacatcccaaaggactttctcaccgaaagtgacccctcttcccccatcgaaggccccgtctcagtgttcatgcttctcttcattaccaaagctattttccattgtcctcaggactacagcacaatctccctgatgatgagaccttctgtgtctctgtcactgtggatcccggtgactagcatacaaacggtaggagcttagagttatttgcttgtggataaaaaaagataatgggattccgtgtcctctgctcacggaagaggaaatcgaggcttaagtttttacaagtccagtgtaaatttgcttgggccagatctgatctggaagctgagagcctcttccccagtagctaatttctcaattttgactggtgtctggaaccaacacagaatcagggctttccttactagtgtggaatgagggccattttgtctctagaggacgacagcacaaaaaataactgacaagaaccctaagaagctaaagggccatttactcactcaggctgatagtgggaacacgctaccatataagtgcatgtaagtacactgaagatgaactagagtgagccaaaatgtggcaagacattagcatatggagtgacgtcagctaaccatgggacacaagtggatcatcactgctgacgtcaggggagtcttttcctctccagatgctgaaggtagagtgaggaggctcttgagggtcgatgcgaagagcaatggcatcctgcagtacctgctcagtaagggttctgttagcaccccaaaattggattactctggctgaagactaatctgcttccgtgtctcactgacgcccactgcttttcttttctttcttccgtgaaagatgacaggcaatgaatcagaccaagctgctgatgaactgggatgcttgctccagtaggttactcaaggagtagtaagaagcgaataataattactactctgtcagtcagggcttcacttactccacaccacctatgctccagacaaggtacagaaggcttagatgtattacttcaatacatctataagtataagtataagtatatggtataaggctggaactattgatttgttttgttttagagttaaaaagcagtccttcaaccctatgcagaaggaaatattttcacttctatttacaaatgaaaaatgataacaaaattttcttcccgtttagaataatcaacttggattttaggctaaggatcacccaaaacacccctccctctgaatattcccagtgggatcatatttcccagtgttgagacagcagtgtggagtagctggagccatccctgggattgcctccagctgtcagggaaagtgaacaaggacttggtattattattggtgtttagactgtgctcttgctgaaaatttttggtcccagaaagatctcacagagaagcctgagctttggccttgaacttttaagctagtgggattagagttgttttgtgagacagaaaatgaaaaaaaaaatgatccccacttccaagattttattttgtcacatagcacaaattgtggctgttcaatgggctcaccagggacactgagtcttcctacaagtctgatccacgtttcctatgtatatcttccctcccaagtctaagatggctgctggagctccagcattgcatgcaggtcccagacagccggaatgggattgtattgctttttgaactgctcctcctcaccccatttcccttttctttctctttcgtcttcagataccagtacagggcttcaaagtaggtgttagaacccagtatacgtcacatctatttttctaatttataaccattcaataaatgcttatatctgatagtaaagggaactcaagatcccccctttttaaattctagcttctaggacaggtttgaatttcttaaggcattacagaaccaagtaggaagcaattcgatggataaggtagtttggtgtatgaacgataagaagagatggtaagtgtcttatgttggagactagaaccttctggaaaggcgttatcactgtgctcccacaatagttgctaaatgggaataaaagatatatgcttttatatttatttatttatttatttatttatttaatgtgtgtgtgtgtgtgtgtgtgtgtgtgtgtgtgtgtgtgtgtgtgtgtgtaggtaggtaggtaggtaggtacccatcatgtaggtcctagggatcaaactcaggttgtcagtcttagtggcaagtttctttagcctccaagacatctcactagcctgttttgatttttgagttacagttatactatgctgccctggttggcctggaactcctgattctccttctgctgcaacttctggaatacaagcatgataggcatatattccacattaatgttatctttgattaactaagtataatatggaatatatatatgcatatatatatgttgttgaatagataagttaatctcccagaagactacacacagcatctgaaataattgacaaatgataaagactcttctgcctgtattgtcagttactgtaggttgctttagttcccttgagctggagtctatgctccttagaggcagaggttgtcttattcatcttgtcaggcagccaagtccttaagagttatttccataccccttcttggacctcatagggtagaacacagtcctgttgctagcagtctggggcatttattgcccctgagtggcaattgttcagctaggtactagattctttggctaatgaagaaggaagaaaggataacgggaattccttagaaatatctttcacttgatcctgaatactatggggccttctggcatgctgtcttgcagtccatgctgtagtaccatgagttgtagcacacccattcattttatgggcaggacatttgaggaccagagtaggaaaggaacttctctaggagcacatgatggaagaagcagcccctctgtcttatactgactcttgaatgttcaaagagcagcactcagccctgctggctccaccctgtgacagtggtgcttccaaccctaaccttcacatctcatatctgaactggagccacctcacccctttcctaaccaagcctctacttaatgccttcctccgttgccttcccccaactgtggctaacagttttcaccataggaacaactagcattggctgataaggacgtctagggatggtctccctaggagaaatggataattttggtgtacaatggagaaagagtactgggattggttaatgagctctgttgtggttattgctgaaaaaatgacaagtcctgaaactgaattggtttgacccctgcttgcttttccttctagggtgagggggaaatactctctacgtgtaacccccaaggtatctggaattcacttaagacattatgttcttacaagcgagatgaacttctagctgccctgaagccatctggaaggggaggggtgggtgtgattcttcacataacaggtgctctcagtcatccattacccaggcagccctatctgatcctgtcttgcatcaggaacataactcttatcaccactccataagctgaatctataaaaatagacaggcttggattgtggtaagtgcccctggagcgactgaggcagcctcacatttaggctccagtgacagctccctcacaggtcagacgctaaatatatcttcttaaggtgtcaaagacagggtcagggagcacaccaatcacatgatcattcccagtcacaaggggagagaccctgagcactctgtcctcagaatctattcctgaactagacacacagtctgagaatagaatccctgtgtgtgggtcaactgttcttcttggggtcttatgtgggacgctccacaccacactccgacaagcgtgtaggcggctgaggagggggcaggactctgaggcatgccttgagagaactgctctgatgagggagggttcccttccagctgcatcatgagctatgaggaaaagaagaagcccaggttggtagggctggagggacttggggcaccaaccttgtttgcctctgtgaatcacagaagataccagtctcattcactgcagagtgaatccatggccagtgacttacagttggtcagactcacactgcatttcgtgaatagcacacacctgttagttcagctgaaactttaattacacaaatattacctgaatacatttcttactgtaaaaccttggaacaatgcggaagtaaagaagtttcccctttccctctatcctgtgttctcttttcagaagtaagtgtgatcaacagtttaatgctcttttcatatttttttgtgtagtatatgccacacaccacaatctccttctcatacacgcaaatagtaaagtagtatagtataaatgctataggtaattatcacatgtgaggtcagatagctatacatccttgggtactttgtttctgtaggctttggattccatctctgtaaaatgaaaatattcatatttacctgacagggtcattgaaaaaattggatggaaagttagacagtgaccaacagagtaaggtcttgttattattatgcatgtaaataagagcatatgatttatggccatactagttactcattatggcaaataaaccacaccaaacattgtggctttaaaaatgtgattaaacccaacaaatattatctcgtaatgtctgagcatcaagaacttaggagtagaagatggttctaactctcaggctctgcgatgctggcaggggctgcagtcctctgaaggcccaagtaggaatgtgagggatcctcttcctagatggcccacttttatctttctccaggatattcctgttgattgcttacatgcccctaagacatggcaaccggcttccccctcaaataaccaatgcagggaagagagagtgtggcagaggacatgtcataccttgtgaccgtctctcaggtctcatgtcaccacttcgttctgtcccttaaaaaggaattactaattccagttcacattcaagagagagggactgaagggaactggctggcagaatatgaacctatgttatgaccactgcagaggttattgtaggcatgcatgggacttgtgctccatgcattgccttgttataattgactgcaacactttagcaacctttccatgttcacacgtgtggaacagtgtccgtctcactgtgtggcgtgtcattgtgaaggtatgtctccatttcttaatcacctctgcttgttaagcatttgtcttattattatttttttatcttttatttttgcagagagcaaggactaagtggtgttaaagagcactttttacagatccatagtccaaagttccaaatagtagtgagattgttcgtaggtgatcagacaggttttcctacaagaacacctacatgcggcactgtcatcattctgccacccctgggttttgaccctgtaccccgagtgaggtgttcttgagacccttccacctgatagggagctggaggccagagtattttcaacattagacatcagaccttaatgaggtccacactagtttgagtattaactcgttgttactaatggatttgggcagccacctgccctccctcccttctccatacacaactcttcgttcatggtggtaaggtctggcctctcagggtgagttaggattaaagtcaaagactggaattccttcaacagaccttcatgcttccagcctcccttgtgcaatgttggcaaatgcgatgtgtttgttattgaggtttctgttactgtatcacagtgactgagatactcaacctgcatgaatggaaggtttatttcagctgacagtttcagtctactatccgttggtcctgttgctttaagtgaggccgtacatcctggcaagactgagtggaggagtacaactgctcacctggtggcttggaagagtaagagaggaagcaaaagtgggcagcatcccaagatgccttcgaaagagcatgcccttaagacctcctgctaggccctgctttttaagttttaccaactcctgacagagccatgatggggagctagggtgaccattgacttttgggacacttaagatccagtgtatacagcataaacagtctaatcagaagtctgccacaggactctttggaaagcctttgccttctgaatacaataacaagatattgcttatttttatcctctgtcatcagtgccctaaatatagatataatgctgagagctggggcagccatcttgagacatatgataaaacaaaactgaaaagccaccatgataaaacaaaactgaaaagccaccatgctcaggggttgaagaggaaggagaaggctgggcaagacctataacggcagcagaggacctacccacagaccttgggtgaaaaatataactctccgttgttttaaaggcacagattgctaaagagcgtttctagtgtctctacactctccgagtccagggaccctgtctttgtgactctcatttgtcagatgtctctgagaggaacagctttgttcatccttcaggcaaagtggtggggtctggaggacagcagcccacctgaggtcagagagttctttcatcttgtgagagagtagacagtaggaaagtgtagttgagaaaatgacaggcttcacctagctacgtttggagacacacgttttcctgcatttctggctgaagcaggtgtttaaaacaaggactttcccggataagcagagcctggaggaacaatacgtctagtaagtatgtgactggagagttttgcccatagcctttctcagtttggggtttgttttctggaaaagcctggtcccaggaaagaggggtggggttggctcttatgagaagggtgtggacaggtctgtgggcagctggagggtctgtgatctaacaccagtgaaaccctggagccagggcttgtgcctggtatacaggaggcatctggccaatgaactcctgagccatgggtgcttccttagcaacccagagcatcagcctgctggagagtcctgtcttcggatgcactgatgacctggcatttttggctcagctgagaggaaagctccctggacacacagacaggtttatcaactctagacagaaatgtctttgccatgtaacattcttttctctttctctctcgtggtcctagctttgtcactgggaaccataacatagcaaatgactctataaaagtgcagatgtaaagtgtatcttcatccttttctaactaggtactcttgtgtagggttggggtacacttttcttaaacagcattcttgcagaggatgacagcattcttgcagaggatgacagggaaaacctcccacatgctgagagccagatgcgggtacattatccaggcagaagaaaaatagctcctagatagccaagtggttcttcagtgaagaggagagaaaatatgttaagaatctcatactgatgtaagaagatcttggaggatttttttttctttttttttttttttggtggggttggggaagcagagccagttttttgcccgtactggaacattgtagctctctcttgaaccagctttggccatgtatggaagaaaaccaagggctgaatcagcctataattttcaggcttttgataattatctctggatctgggagtgtcataattcgtttgttttggtttttcaagacagggcttatctgcgtagcctgagctgtcctggaacttgttctgtagactaggctgtcctcaaacttacagagatctacctgcctctgttcccaagtgctaggattaaaggtgtgtaccaccactgctttgttgtgtcttaactttttaaatatttttagcagaaagaagatttcctggagttggatttgaatgaaaaaataaatgggaaagacacaactgcttcaaggtatggtcgaggagaaggttgtagataaaagagagagcataggtagaagcagggcacatctaggaaagtccagagtggacatggtcagacagggaggggagagggagggtaaggaagggaacgggggggggggcagcagccaggagggcaaaggccccaaaggtgcaggcaacagactgtctggattatatagggaagggcagtccaggccctgggctggagaattcagggtagggggcaggatatcccagccatactctgtaacaggtagggactgagggatgttgggagaacctggcagccaggtctgctttgatatattaagtaggcacctcagccttttgtcctgggtttgtaccttaacagaattccagtgtctggtctttgtcacggaagggactttctggtctttggtctcttgttttacaatgctactctctttattgggttgctacaaagatttaaataaaaccacacaaggaaataccagacacatatattcactaacatggttactctttcaggactgccaccaccattgctgtccctccgaccatggcctgccaccactgctgttagaatcaattgatcagacccccattgctgttggtcttctgttacagatgcaaacgttttaaataaagaagacaaaccttcctttcagtgaccaagagggagggatcacagcgttacattcctctttcctcttgaaaatagatggattaccttcctttgggtcttggaaggaacatctggcaagattggtctggctgtttaggcctcgggagacaggggaactgctgtctgtgtccctctgcctggttctgcaactgggttttggatttcaggcctttgcagggggcatgatgtgtatctaggctgctgttcagtttgcagggctgtgcggtttctgcctgctagccagaaattagattcctctccatctgatcctcttccctgagtctctgaatgagaagactgtcccctccccgtccctgtagaggctgctggtgtcatttcaagtcagctcaggtaatggatacaaggcagatgtgtagcagtgtagaatcctgtcttctgggtccatttccccaaccagagtgtctcactaatgaacacggggatcctaaaagcagctcttataatcacaaggaatgccgctacatcttttttgctaaaagagccttctagcttttgaaaactgcaatgactctcattacagagactaataatcagataaggaaaataagccatctgcagtcagagctcacagtgctgatgcattcagggtttttctgcctatgcctgttatgaattctattttcaaataggaatgcaaccatactccataacgcagacttcggtacatttgcatgaatcgatgagatgtagtcaacagctctctagatcttttagttcttctctgagtcattttttttgtctgtttgttttggttttttgctttgtttcatttttcaagacagggtttctctgtgtagccctggctgtcctggaacttactctgtagaccagcttggagatccacctgctgctgcctcctttaatcagctaggattaaaggcgtgtgccagcacctcctggcaggcacgattttttaatagcttttaaattatggtggtggcatcttcattaactagttaattgaaccactttgctgttgtgaatattgaggttgttcactgttactaacagttttgtgactcacacagccctgcatgttttcttggttgctcctccccagggcctgtgcttgacaaaagatttgctagaaaggctgtactcatttagaggttgaaagagttcctgttctagctggtcttcacagaaagtctgtgtgtgaaaggtgcggagctgcctcgtgaccttcaaggtgctgcctgggcgcgttttggcacagctctgcatgatgggcaggcgggcgtggttattcatattttggaagctaaaaaggctccatttcgaagagcccacagaggaaccccaggtagcataatgaagtgagttcgcacagacagctcttgtgataaagtgagtaacttgtggtgaggccaccaaaacaaaatgactatgggagctgctttggagctcttcctctttttcctagatggattttggttttgactgattcatggtaattgtgtatccattggatagtaattagctactgaggacaatggtttgttaagtatgtggcaatgaaagtatggtctcagcatactggagagcacttccctttctgtcttctgtccaggagagcaagcccctgaggactcaggagtgcagcttgttcaaaattctcaagcagttaagttgacttagccaaggccactcagagtgtcagtgaccaagtcagaaatagaagccattgcttcctgtgacaaaggatgtgcttttccaagacagctgggctcttgccattggccaagtcactcaaacttctgtagttgtctctataagagcagtgggctggggatctggttaaaatgtaggttcccatctgatagtctggggctaggtcctaagttttctgcatttcttacaagttcccagatgattcctttggctggggccgctcttggatcagtgagcagccagagaaagagctcagtaaacagcagagctaatgacctagataaagacacgactcactggcaaagagaacatttgaaatgctgatggctgaaaagggtgttcccaatagttatgagtcttaaaggtcatatcctgtttctgctagaagcacccaggcatgggatcactcaactggccagatgcaggctcttcagacacacctcttaacagtacaatcgcccctttattgtatggaagaagctgaagcaaggcagccagggtagaagctttaatattccaaaggctcaccaagtgtccccatggatcctaattaatcacctggagaaagaccaagttgtctgggatgggaagagaacctcacgccactgcaacgtcagccccgttgacacttggatgacaaaaagtagcacttaatgagaaaaggagtgaaacagagcctgggcacaggagcagaaggccacggcctgtgaagtttctgcattgcaggcatggcttgcccactcccaagtaccggcaaaagacgtcagaattattcagggtttgggcacagagttaaaagtagttactattaacagttttcaaggcagggggagtaggttgcttggcgccatggaggggtgaacacagcaggccaagcagagccagccctgtggccagggttggagggttgagcccgcttattatttcttcagatttagaaccaggaaatgccagcattaaagctggagcatgagtcataggaaaagatgtagaggctgagaatactggtgttttgaacctatgctccctggaactccaaagcgtctatgggaagccatttcagggtctgctgctagggtcaggtgtaaagggatgtggtccttcatcctaagtttagccccactcggtatctgctttacaggtttggattctgaatatgatggatttttataatgggtcttatacttaaacatctctttatttgacagctcagaggaggaatataacttctcagagatttatagccagtttgtgacatggcagggaggtattttctctgagggtgtggatgtaccacagtactatacttaaaatgccctcaacactggcatcttttcctttagggcagcctgtttattttgttccatttccccagttcagatctcatcaaaactcaaatcagtgtcctttatgccctaatctgggaagaggagtagcctatataccacattagccaaggttatctgtgtggtgtgatgtgtgtggccctcagtcaacctttactgttgctcatctaactggaattcctgctttaggtgggacaagttttccgatgaacttgcgtcagtgcacctaagaaatggaggactagtttatgtttgtccattacacaaacgaggagtaatgtgaccagcaaaaactctggctgttttataagcatgtggtgtaatgtaggtcacatgctagttaataggaccagtcacacagattctggttgtcttctttgaaaagaccaggtacaaaggactgtgggggatgctttcagaactagttcaggagtctccccatttccttccttgttcttgtatttgtggtggtctccatcaagatgggtcttacattcgccacgttctgggtctgagctgttgcaacatcaaagacatttacctcttgcaattttactatggagaaaaaaaatttcttccttcctttttttttttttttttctttttaaggcactataccttctgtcaacccacatcaaggctgtaatgtttaagtcagtaatattttggaagtttattattgtatcagatgagtagcctatcccaatagacagaggtacttttataaaaaaataaaacaataagagaatatattggacattgctgattttaccataattttttctgtttgctccatggttcatccaatttgatggtccaccatcaaataaccatgtgattagagaaaggattcatattggaagaatttaggattggttatagatgaattgctaaaagtttgtgactcatttcattaaaggaaatcacaaagagtgtaataaatgatggaaaaaaatgaatgatatttggtgaatgctatattcaaggtcagtgaggtctggagcattgttaatcttcatcacttacttagaagagcctgtcagcattattttccttagcaggctaaggggctttttttttttaaatttatttaacttattttatgtgtgttggtgtgaaggtgtcagattccagattccaagaaactggagttacagacagttgtgagctgccatgcggatgctgggaattgaacctggcttctctggaagaatagccagtgattttaaccacggagccatctctccagccccgggacttcttttttaaacctgagtctagtcctgaatttctagactgtgcctctgatttaatgacagaatgtggctgaaattcatctcccttagattttttccctggtaccagaaaattaaaataattaggacttctgaaatggaaataattttgtaaaaatcgtatttaattttcctttcaggctgttttataagcatcacatccaaactctggtcatgctcactgccacacttgcttccatgtgaattacaagtaagttactaccaatttcagttccaatttcacaaaacaagatggttccaatgattgactcagcttctaagtcttgaaatattttttattgccccacctctctggaggtcagaagacaacttagaggcactggctctttccttccatcttgtgggccctagggatcaaactcagtgggtcaggctttgtgttgagtacatttacattctaagccatctgctggcctggctttgttcttcactgaatccactgtagttgggagatcacatgatccctgacttgtctagctaagaggatcccatgctacctttagcaagagatgctgtggcttgtgggaagggctgacaaccttatagaagcaaattacgtattggagagctccatgggctatttggggagggttttgtttcatttcttatttgtttacttcaatgactgctagtattaagtggaaatgaattgtagctgttcaaatagaaaatgtcactgaataacttaaaattaagtagaattttatctgctgcatttgaaggcataggttaggatttctaggcgagcagaatgagcacatacatgaaatgttgagttagaagacaaagggagagagctgtcttcgtgagtcccataacacaaagagggcaaggacaaaacctggatcttggtcccttgctgctctctggtgtctgtgccttcatctctgaggattccacaaatggaatctggttctctttagctgccttggggtggtttctgtggcacttggcaccgtgggctgtgtagaggttcccaatatgaagatggcttggggatagtggaagatgagcttggctgcaggaggtgtgggaatggagcctcaacagtttgcccattgctgaagagcgccatgtaggctgggttgatgtattccaatatttaaatattgagattctgtagacagatattctaaactttttaatcacatttgtgtaagtgtatatatgtaaatatatgtttatgagcatattcacacatgcctggtacatgtgtggaggctacaggataacttggggaaatctgttctcttcttccattatgtggatcccagggtttgaactcaggtcattaggattggtggcaagagcctctatctgctgagctatcgtgcctgccctagaaggcatgactagaaatgtttgatgtctcttgacctaccctaaacttctgtattggttacttttcttgttgccatggcaaaacacccgataagaaattaaaggaagaaaggtttattacagtctacaattcaagaagattcatcccatcattgcagagcaggcatctcagaagaagccagagtctaattggtcaccttgtatcctcagttgggaggcagaggacaaatgggaagttaaggactgtaagatcttaaagcctgctcccagtgactcactccctccagcaaggttccccttactaaagggtctgtccacaggctgtcaaacaagtgttaacatctggggacaagtgttgaaacacatagacctgtgggggacattccacattcaaaccacaacaatgtccctgatgactaacgtcaatcagtgtcactatttttaacgtcattaaatgtgatctcacagcctttctaaagtaaggtgtgttaggagaatatgcctatgtaatactggaattcctgggggtggggtgagctgggggcagtttcaggttgtttgtgaaatctccaaaatcttaagtatagccgggtgtggtggtacacgtactacagagtcccagctactcaggaggctgagacaagaggatcgcttgagtccaggagttctgggctgtagtgcgctatgccaatccagtgtctgcactaagttcggcatcaatatggtgacctcctgggagcaggggaccatcaggttgcctaaggaggggtgaaccggcccaggtcagaaatggagaaggtcaaaatcttaaatagaacaagggtgtagctgatgctaaggccaggcctgagtgaagacagtgtgtcttctatgtcaccagctgccctaccagcaactcctgagctccagccacaggcactcaatcctgagccccgcccggacacaccctatgaggtcacagcccctttctctcagaactacagcataatgttgggagatggcatccctcatttctgataagctgtgaatttattattaggatggaatataagcgcagctatatcttaatctattattttaaaaaagttttattgcctaggctaccactctacacttccctttctcatatacgagttccttctgggaccgttgaagtgtttttctaccagctggaccattgttgggagtaattgcttctctccttccaccctgggaggaggggtaggtttgtggtctcttatgtcgaagaaggatgcttttgcaagttgtttcttttcctcttcaggcggccttttcctaggaggtagggatgaaggctgctttggcaagacctggagaggaactctgggtccctccagtttcctggaggaaccattcaactgattttttttttttttttttttttttttttttttttgtgactgctcaagtctgccccaaggtgattgcggtgttaactttctaccgcgatgacagaatgttggaaggaatcagtttacgggaagggaggcttattttggttcctattcagaggtttcagtccatggtctcagggctccattgttctgaggaagagtattgtggtgtggagggtgtagcagagcgaagctgtctgtctgtctaccccttcatggtggccaggaaaggggagaagctaggaaccagtgactcttactccctccaactggcctgacctctcacagtttcaagctcctcttagttgctcataatctctgaatcgttaggtgtgattaatccattaaggagattagaaccctcactagcaaattaccttccaaaggtccccctctgagcgtgattgctctggggtccacactttcaatgcaccaacattgggatcatttcagatccagaccacagcacttgctctctccgagcttctaggcatggtagaggctgtcatgggacactcgcttccttagccactccctcacaaagcagatccaaatgggcctcaacagccagcagtgactcactgtgccagactcaggggcactcagtctttccgtcatccattccgctcagaacttcctcttttcagacccggtctccactcccttcaacctttctcttccagaaatgctttctcctggatgtctacttctgagatctcctaacccttagaggcagctcaggaagcctctcttccaccctgcccttctgacatttttacatcaaaggtcgggaagcgacgtgttctcaccatccagcgcttttctttgcctctgctggctgtatcacgcccctctggctgtcctgcttgtcagctacctggtggagcacagtggctgatggcactgtctttggactgcttctgtaccctggctcatcagttttgagctttgtgggacttaaccttaacctctctactgctcctcagtaagtgagggagatgtgatgtctttgccttctttttattgtgaaacttacatgggctaactcattcctgccatataaaaggccagcttattcattctataaatctttattttgtgtcagaccctgaagatcttatgccaaacatccaagtcattgcctctctatttatttatttttatttatttattttttttttgattttttgagacagggtttctctctgtagctctgtagatcaggctggcctcaaactcacagaaatccatttgcctctgcctcccaagtgctgggactaaaggtgtgagccaccaccgcctgcccagctgcctctctattttaatgacaaagaaacacaacaaacaacaaatactaaaaccatcatgcactgtctgccaatcactgttctaagcattttttctcatagaacgtctctgtgttatacatagtcattatctgcttacagatatgaaatgcaacaatcagtatcttataccaatcaaacagctgggaagtagtgcagcaagaacctcactgactctctctgtgtctctgtctctgtctctgtctctgtctgtctctgtctctgtctctgtctctgtctctctctctctctctgtctctctctctctctctctctgtgtgtgtgtgtgtgtgtgtgtgtgtgtgtgtgtgtgtgtgtgttggggggtgtgtggtacaaagcctgaaggggggaaaggaagtcagccagagctcttagcacaggggcaaaggaggaggaagggctctgagaaggtcacctggagtttcaggagtttcgggagatcatgggaggcaggaggaggaacaaatgcagactctgaagcagaagtgaaatagattctacaaagcagctccaatgacagttcagtcaggactagcaactattaaaggcctcaggaagaatctgcgtagctatggatttgactgttacaaatgctgtttattctgccattataaacacacatcttgctcttcccattagcctgtaggccaggattgtgtatcttgttcagtcttgtacgtgcccacaggacttggtagaacacgggcctgcctgtttaagacactggtcattctcaagggaccagatcttgcagcctgaggagatcaagccacacccccatgcagttctttctgggacagagttaacacacagcttttgctgtgacttatcagctcataacgtatgatgcctggctcttccatgctctttgacatgtgtgctctgttataaaaaaataaaagtctagtgataggaaactccctgctagcacggcccccaacttctaaagatctgatatttcctttgttcttggggtcgctcaggggcttgttcccaggggttttctctatagtctcctctgcttgcatcctctctctttgacaactctgtagactgggtaagccttgaactcacagacattgcccaagttcctcttcaggtttagaaaggatgccaccccttccttttatagccctcatcatgtttgactcccatgcatgttctataactttttgtctcgggctcaccctcctacctggaggccctgtcttttaatcaccaccccttcgtggagggggattgtgtgtcagccttttcttccttggaccaaccacggctgttctttcctaacactattatgtttaatatcactctgttctatggctttgttcatagaaatttaatggttttgttgctttggagttagagtttcagtttaattgggtgaaccttgggctgtggagagccagctcttcagccagctccaccacttagtagcacctgtggggagctagcttttgttttgtgactctgttcccacatttgtcaactgcagagaagaacattccctccaaagaatgttgtcaggattatgggaataatgcatatagagcagacatacagacatacatacatatttactttatagcctttctaatgctcttttttcttgcccttagactgcataaactgacatcgtatgattactatagtatgattaaggggaaggtttttatcgtagatgtgagagagaacagccagaggccctgggaagaatacagggtagagagagaaagcagtagattgagcgtggcctgcagactggacgtggccatgagagaagcaggagcagagagagggagtgggctggggggaaaagagagagagaggggtatcatgagaaaatagcagagtcatcaggagaatgagtagctgggtgggggaagcccatagctggagggagtctgtggtggggagcatgagaagggctaggatgctaacatggactctggaatgtataagaggtgcttgtgacactgatggagcctggaggccagcctgagagttggtaggttagtgcatcccataaccttgtcaatgagccatgatttcagagctgcacactgccactcaggcaagctgtcactctcagctcataggtaccagctgtccttttatattttttgtgtgtttgtttatcctcccccacccccatagttttactgttcacttaacaccacctagggtcacatgggaagaaagaacctcatttgaagacttgcctccctcagattggccgataggcatagctatgagaggctgtcttgactgatcgttgttgtgagagggttcagcccactgtgagaggcaccatctctaggcaggtagccctgggctgcataagaaagctaagagaagccaagaagcagcattccttcctggtttctgcttgagtttagttcctgccctgccttcccttagtgatagaatctgatctggaaggtaagacaaataagcccctttctcctcaagttgcttttggtcagagtgttttcttcctttctttgtttctaatctttaaaaaattattttttgagattctaatataattgcatcatttcccccctccctcaaaacacttccttgctctctttcaaattatggtctgtttcccccattaattgttattacacacacacacacacacacacacacacacacacacacacacacacacacacacgcacacgcacacgcacacgcgcacacacgtacacgcacaatccaaaatacataagtacaacccgatcagcctgtataatgctacttgtacagatgttttccctggggggattatttcttccattcttagcattcttcagttgcctgtagttctttgtgcatggctgaggcctcctgggcttcccctgtccacattagtgtgtttgttgttgtctttgttcaactcttatttaggcagccatgttggtgagactttatgggtgtagcttctcacattcctaggagacaggatctcacagcaaactccatgtccctctggctcttacattccttctgctctgtcttccaaaatgatcccctcagtgttaggcgcaggagttgtgttatagatctatccattgggactgggctccacaactgtgcgttttgattagttgtggttttctgttgcaaatagaaacttccttggtgactagggaggacctcacttatatgtggttataaggacaaatacttacaatgtagttaggggttatgctggcttagtggttgtagattctccaagaccaatgacatcagtagctctggctagttggctgggtttcccaaccaggcatagttgccctcttgttgagagggtcttaagtccaatcagaagatgttggttactgccaaggtatgtgtgccacttgtcatgccgtgttggttattgtggttcatagacaacatagctggacaggactattggtttcttcactttggaagcttgcatggagccttttggtaccatcaaagctagtcctcggaaatgaggctttcaggtcagttccagatctggggcctctgagccctgtgtctgaagagcatcatgtcttaagcaatatgtactcaccttcctcctctgtggggcacccaagggcaatagctctagtgtgtgatgttttggggatttctcggacaacctggttagactgttctatcatggcaactgaaacaaaactaggacaccagccaactcgggatcacagggaaatcagtagaactcatccatcaaagaagagctaggctgtagcttttcttatgctcagatggagatcactggagcatgcagtgttgtttgacctgtccctgccaggagactttgggtcccccgaatagatgaatgattattttaattcttggttagttttgcagtgataacattacccagggtactctctaacaggaggctccctaaccctttcccattggtcagtggtattgtttagatccaaaatgttctctaacatgaaacatgttaaaggtttggtctgtatggtgacattatttggagctggtggaatgtttaagacgtgtggcttagtggaaggtcactggggtgtgttcttgaaagggaggccaggactttggtcctcttcactctttcttccctagcctcaaggggagtggctttgcttcatacgtgttcttgccacgatggactactttgtcacacacccaaaagcattggtcatggattgaaactcccaaaatcttgagttcaagcaagtcttttctctccataatctggttatctctggtgatgctaaattgaccaacagtccttcttctaaccttcaaaggaacttgggtatttccctaaagcctaagactcgttcttggttctttttttcttaactttggtgatgagtcatcaggagcatatgacacccgctactcccccaggccccagctagactttgctgccctgtgaggaatttcagggttcatgtgatgtgcagaagcgcaatttgcaggcatactccagatctgaaagcccaggttggccaggcaacatgcattccactcattttccagcctgtccagaaagtttgccttgcaccagcagagggaagaaactgaggccaacccctctgcagcctctaagtcacactggttccttctcctcgatccacacttagaaacctgtaaggtttcctccaactagactctgagagccagggacacatttcattggcgttccagctttctctcatttgacctaaaagacgtagctttcccttgcagcatttttggacttctctttctctcaaaataaatttacatttaaaaacaatcatggccaggtctttataaaaatagggaagatctgcaatattaattggtcctggtacttatccggctacagagctgctgtcctgcaaacatctatgggactgaataatgttttgttgaactccctgggctatttgtttctcagagatgcagcccagtctttcttatgtacatctcacagaagacacattcagactttgaagtacttctgtggtaagacagggaattgctttcatcatccttccaaatggaggtaaaagttgggctcctattggaccaaagttcaaccaggtctgtcacctgccagattagctgtaataggaggaatggggtttgacagagccctgtaccaaccgacccttttggcattgtaattgtgagcccaggacattgacaattgttatatttaccccaaacagaccaatatagtgtgctctggtttggaggctgctgggggcagaggctatgattcacttaactttgcattcctacacctggtcctgagccataggtggtgttcagtaaatacttgctcaatcaatgaatctgctaatcctgaaactcaccagaaagaccagtcacaccattttggctgaatttaagcaagcttttattaacattttaaatactgaccaagatgggatttggttaggactaccatctggaaacttcccccaggtaagtgggcttgagacagggctcatatggaaaaacccataggccactgaactttcccatgaagttttgttgttattttccaagaactacaactcctagaatcctgggaagttacctggtccttgggcaggtgttatctttcaaaaaccacaattctcagaatcctagaaagttacctgatctttgggcaagtagggcttacaggttaacataagatctaacacaatcaattaaagttaggacattatatgtggaagccctataggaatttcagagagaaacatgattggcattgttttctctttgaaggaaggtcacaagacagctgtgtcatgtggctcagcaggtcaccttggggcagcataagtagatatatgctcgggagacaacagtaatggagacctcttttaagtcacggctgtagccgctgctcctccccttgttgtgcagcgcgggaagtatcacactccttactgggtcagagttgccctgcatcctgtacgatacaaagttatgagcagcgcttccttaaatgtcaggcgagtcattcagaatttactgtgcagacgcatcttgcaattatccaggagatgggtggaacttacgatgcctccctaacatgtatgaccatggagcccctgggaaggagacactgtggggttgcttttccacagaaatgtcacgacagccatggcggatgggagacctcagaactgatggatgatagcatcggtgctcgggacaacaccgagccttcctttcctgccgcactaagaatgaattctgtctttgtgattgtaaaatttgaggcgattcagaaaaagctcctctgaaaaaggtcgtaagccacaatttacagatttcttagtttcctttcaattttcaagttctatgatgtctgtataatttggtggattcacctctaggcattgaacacaatttcccttcttttttttccttccagtcacttgctaacatctatgaataaagtacacacacacacacacacacacacacacacacagacacacacagagatacacttacacatactcacacacacacaggcatacacacacactcacacatacacacacacagacatacacacacacactcacacatacacacacacacacacacacacacacacacacacacacacactcacacacacacacatagacacacacacactcctagtcttttctggagtgaattatctaaaataactgactgaatgaatctctgctcattgggcctccagcatttaagtctcatttaggctctgactatactttttatttcagttaaaaacaaacaacacttccaacagagaaatggcttgaggcagcaaagggcagttttagaacttcctacttcctctgcaattattaacaaggcaagatgaacactgcacaagacaagcataaacccaccccagattggagggagaaaaatgctcctgttgcttgtcttgacttatgctaaatttatcatggctttcacactaaaaccacctccgcctcaaaaagaaacaaaaaaaaaaaaaaagtgacagagctccacttaagtgaggaagctgctaattaccttccaggatggtgtgacagttactaagcctaaaggcttagcagacagtggagttcttatgtgaggaaatggatacacctcagcaggtttttgccctcatgctgcagggtggtaaaagcacccttggaggagagccttggctccacagtgtcaggatatctgtagttgtcagtggcttattctaaaccgggggtggtgggaggaaatgcttgctcttgttagaaggaaaccccatctttgctccacagccaagccaagcctgtgtctctctgcactgggcactcctcttttatcatggagactatcatgctgctcagcgtagttgctcaactccgaaactccccaattctctaagatggctgctgccaaaccaaaatgggtgctatgctgataagcctacccagggccaggatggctgcattggtggactttcaatatagggcaaggactgtgtgtgtcctgttataggacagagaagaagtccgatcaatcgaagtgaaattaaaaattaacgtgcttttgtttgctcagttttaatctttgagtaggtcaatacccagggtctgtgccagtaacctggttaaggctggccacagagagtgcttgaagaccagcatgggtaaacagggctgagagcagctgggcaggcctggggctaaatacatctaggatatggacactcacaaagtgcttccatggtcctttctggggctggcatttgtgctgctggcatggagggtttgaaaggacccgggccctggggatggcatggactcccgtggttcactccaaggaaggccaaggacaccaagtgacatcttcctcttctctcttttctgtaccaagccctctccacaggacaatatggccgttggaggtctaagggagctggctagagatgagagtggtgtgtataggagacacatgtaaccagacaaaatctaggggtggcttgttcccacttgtccctttcccttttgggagtgtgtgtgaatgtacctgggaagtagacttaaaatgtacctgtgagagttgtcgtgcttagggtttcatttgctgtgatgaataaccatggcaaaaataactcagcaagggaagggtttatttcagcctatagcagctgttcatcatccaggaagcatacatgcgaacctggaggcaggaactaaatcagaatgctgctcaccggcttgctcggctgggtatgctcagtctgtgttcttccatcatccaggaccaccttcccagaggtggcaccgcccacatcaatcatcatccaagaaaatgcccggtaggctggaccacaggcccatctggtgggggccattttctcagctgaagtttcctttttccagatgactctagagggagtcaagttggcataaaactagccagcatagctgtaaactgaagttcccagaaaaaaaggaaacttactcctgtgttaaaaactctacaaggccaagcgactgaatttcatggtcatggagagttaaacattgtagaccagagccaattgatcctgggctatttttagtccctttgaaagcaagtcatcacttaccccatgtctgacccaacacccttgtaactatcaaagctttaaaggtatattttagcagatcgctagtttccactaatctcaaagctaagatgtcatcagagagcacctgagacctgcagctgaattttctccacttttgtgttccccatcaacctgtgttccgccagtgaatttagtgaatgacttgatctgtgactaaagactcttgtgtaagcacctccgcagggaaggagcctttcacagcaacctgaacccgagttctaggactcgaatttgacgccagcatcaattcttactcccttggaggggaaagctgtgggagtttggttggttgtttgtttttgcattgatggcacagttactagtatatagctactcaataaacactgatgactgaaattaaaaactgaaagagtggacaaggctcatgtagactagagacaaaagaatataaatcttaacttacagtcaatcaattgcatatagttgctgattcctgtccctaccagcttctcttctcttgcttttactctctctctctctctgtatgtgtgtgtttgtgtgtattatagtagttctaaatgagagggtgatgtgggtattaaggagtgtgtgtgtgtatgtgtgtgtgtatgtgtatgtgtgtgtgtatgtgtgtgtgtatgtgtgtgtgtatgtgtgtgtgtatgtgtgtgtgtgtatgtgtgtgtgtgtgtatgtgtgtgtgtgtatgtgtgtatgtgtatgtgtgtgtatgtgtgtgtgtgtgtatgtgtatgtgtgtgtgtatgtgtgtatgtgtatgtgtgtgtgtatgtgtgtgtgtatgtgtgtatgtgtatgtgtgtgtgtgtatatgtgtgtgtgtatgtgtgtgtgtgtatgtgtgtgtgtatatgtgtgtgtatgtgtgtgtgtatgtgtgtatgtgtatgtgtgtgtgtatatgtgtgtgtgtgtatgtgtgtgaaatgctgctagtatttagtgaatagagaccagatatgcagctatcactgaaatatcttgatcaaaatgtccataatgaaaggctaagaaatatttgtataaatgttagtataaaagaatgttgccaaattgttcctaatgacaacttatgcagaggaagctggaatagagttttgaaaaatgatgatttacttaacaaatttaatcatttatttattgttagaattcttttttggagagtctgcatgtggcttggcacttaagatctgtctgccgttgtataatattatcttagaatgtgttgtttttgtttatgctgcatttgtttaattctgtgaaactgattcttagccaggcaggagcaaggatgggtggggctggcaggcagaaaggttagatagaaggagaaatgaggatgagaaggagcaatgagggaacaaggagaggagaatgtcagggaccagctacccactgcacagcaagacttggagtaaggaggaaagaaaggcatacaggaatagaaaaggaaaagcccagaggcaaaagatagatgggttaatttacattaagaaaagctggaaagaagcaagccaagctaaggccggcattcataactaagaataagcctccaagtgtgatttatttgggtgctgggtggtggcccctccccaaagagccaaagaacataaaacaaccaacaacagtctgcttcagcttccagggggctggaattgcaggaatgcaacatcatgcccagcttctggaatttattaatttttattttatgtgcatgtggtggtttaaataggaatggcccccataggctcacatatttgagtgcttagtcacaagggattggagctctttgatatgattagaaggattagataatgtagtcttgttcgaggaagtgtgactgggggtgggctttgagatttccaaagcctgtgtcaggaccagtcactgtctgttgcttacagatcatgatatagctctcagctaatgctctgaagcctgcctgagtgctgccatgctttctccctgccatgatgacaatggactaagcctctgaagctataagtaagccaccaattaaatgcattcttttttaagaactgtgactaaggcagtgtgtgggtgtttgtctacatatatgtatctgcaccataagtaagcagtgtttgtggaggtcagaagagggtgtcagatcccatggaccctgagttacagatggttgtaaggcaccatgtgggtcctttggaagaacagcaagtgcttttaatcactgagccatctctgtagcccccagatggagaattaaaaacaaacaatggaacccaccagtgaattagaaaggtattaaaacacttaagctggatactgagtagacagctattaaaatcctagcatggagtagtaaaggagcttcgggtgctgctcacagcacagagttgagcagacaagttctccttcagcagggcaggaagccctcagtgtttgctgaaatattgcttttcttttttaattaaaaagacaaggcacttgggtaaatgtaattactgtgtatgccacttccaaagcacagttgatagcatcttgtcttaaaaggaggaagccagcttagacagaagaaactctagtctgtgtctatcctctagggcagcctccccttctccttcacctattttggcccagcctctgccatcagggaacagagtctcagaggaggatgtggtacaagggagaagataccaatggaatcctgtgctggtgctgaagttgctctagaaacagccatgctcacaccttcactttatggaagagaaaatgaggtccaggaaggttaagtttgcctgagactatacacacagctactgtccgagtagggctgaagcccacccaggtctctcctgaggttctggggtgtgatgtggctccaggatgcccgctgcttctcctttgccaccagagaagccatcagatcatttgccaggcaggccctggactcggtctacattcccagtctgtagttcacacccctgaaaatccaaatgggggctgaagagtttcctgcagcagcctgcacagcagcacagcctgggcagagcagagcacatctatctggccactgtgggatgccaaccagggaggtctggaagctgcttgtgaggagaagccacacagacataaactcatgtttggcaggctgggtccatggatgggcacagtactagaatgaatagcttggaggtaaatgatgtgtgggatgtggtgacgtgtgtgtgtatattatacctgcatgtctgtgtcagtgtgcacagagaaggttacgtgtgttgtgtgacttttcctagggagatgtggagaatcgtctgttcacttctgtcagggcacctacagaccaaaggaacaattccattcaaacccagcttggcagacagtcccatgagtttattgggtttatgtataggggcttggatacgcagttactaatagggagtattggtgactcgtgtgaatggcagttcccagaagtaaactgcacccctctcgaagaatccacaagacggaatgactgagtaggaccttgtggttttggagtgttagagtgttgccactaactagtcacagagaccaggcagtagtgacagacacctttaatcccagcagaggcagaggaagatggatctctgagttcaaggccaccctgggctatacaagattgatcctgtctaaaagagaaacagagccagtcagtggtggctcacacctttaatgccagcacgagggaggcggagagaggagtgatatggctggtcggaaagagggatataagacgggaggagacaggagctcagtgcattcagtctgaggttttggagagacaggaatgcccatttggtttgagggttcccccaaggatcctcttggagccaacagtaggatcaatgttggatatgatcagggcacccttggcttggctgatgctccattgactggctgcttgggtagctgttttgttttcagtcatcggttgttttggctcatatcagaatgcccctgtgtttgctgccgttccttttctcctgccactttgtaatgttttaattctatgtgttttggtgacttatgtttattgcacacttgctcctttttgtttattgcaaacttgcaataacatcagggagaataccacacatgctatcatgagtaagtcccagaaaacaccttattcctgggttgaaggggtttggttgggatgagcgctggtgctcagttccctttctccttattcagtccacaaccccagcccagggatggcgctactcatatccagggtgtgttgtctctcctcggttagacatttctcaaagacataccaagctgtgtgtctctgtgtcaagttgataatgaaggtgaaccacacagggatactgtctgtttgcctatgccctcccttctctcttctccttccctgtcattgcctcttttgaaaagccaggtagtctacatccttagcccagcctagctaaagtaaacacatttaagacttaattgtaaaatttgagacctcagaaaaactcattatgtaagaaattgattgcaggcttgataaaaatgcggataataaaatatttgtttattttgtaaagatttgattttttgtgtgtgtgtgttgtgtgtgtgtgtgtgtatgtgtgacagagagggggagagggagagggagagggagagggagagagagagagagagagagagagagagagagagagagagagggagagagagagtatccacatttgtgtgagtgccagaggagaccaggagagagcattcaatatcctggagctggagttgctgggaacctaacttgggtcctctggaagaacagcatgaagggaagatccagtaagagtgtttgctgctctcacacaggacctgggtttgcttcccagcactcacatggtggctcacaaccatctgtaactccagttctgatgctctctggtctccatgggcactaggtatacaacccatacatatatacatacaccgaacacctttacacataattataataataatttttaaaaaagaggggaaaattcccttttaactactgaattgtctcttcagccctaaaatgttaattttgagtgttccagtgtaatgtgagttgtattggcaaattgttctgtgttgtttatgcttcttgagagctgactctgcgaagaacagatgagctttctggtctcagacccaagtattttgtctcagcatcttgtgtttcctgaggcaagtttgccctctgcctctgtgacagggagaaaggagaacagcaaagagtgaaatgtatccacattgcatccctgatcaaggctagacgttagccctttccacaggaggagtaaactcgtctgcagtgccagtgggagggcagatgctcccgatactgaggaccgaaccgaggaccttgcacttgctaggcaagcactctaccactgagctaaatttccaaccccacaactaaatatttgcattataaagccaaattttataaataggttaaatatttgtccattaaaatggcttgtatgattgttttgtaaattaacaggaatgtggcaagtaggaataattccttgcaatagtttattttttttcctttttcccctgctgctgagatgtggctatccagtaagtgaatgcttcctccaatgggaaaaaacacagatgcaggcagatgcagaattggggtacaatctaatcaaagattttaaacagctcatcagtaaaagaataaaacaaaatctttgttttttaagccagtcttttgtaaacattaccaaggacaggtcaatatttaagaaaaccttatttgttttaagcaaagagtcaagcatgcgttgtatcaaagggcattggattttggacataggaattttaacaacttttaattttagccagtttagctatacccatgttgtctctaacttttcacaatatacttaacttccaagttttgacctcattggtctatttccacttttggaataaacctttactttaggacaaaatctttatacaaaatactttctcatcaaaaactgtttccttttttctttatcttctttattaaaaatacattttatacctataacctttatatcttcttttcttacccgattttcttctgttttaagtttctttatatttttttcttttgttttttgaaacagggtttctctgtgtaatagtcctcgctgccctggaacttgctctgtagacggggctggccttgaactcagagatccatctgcctgggaatcaaagaagtatgatgccatcaccagcaagacaaaaatgttattttaatgtgggatttcaagggtactaaaagcaggattcaagtctaccatttccattctctttacttttgagtcatctgtttacctttgtagtgaagacttcaaccatttaacatgcattttaccaaaatgatcttaacctttagaccagagaactcagagataagttactgttccctgtggcaggatatttgatcactctgtgactgttaaagttaactttgaatcagggtgtggagtcagcgagtagctgactggaattagtcatagagattttggaggacccaggatgacagagaggcataggaagatgtagccagaagtttctgttccacatatatacagaaggacatctcccatcaggaaggagtatgaaggggcttagaaagattcactgggaagtgtggagagaaggtcagctggttgtttctctactgctttcttcaactatcaggtttctaacccaaaatatgactttcaagtttttactgataatagaacaatttaaataaatgattcagtccccaatatactgaaaaataaaaataatatgtataatatagtggagtacattctgatcatttgaaatgactttgcttttaagttggttaaaaagttttttgtttttgtttttttttagattttatttcttatgtatacagtcttctgcctgaatgccagcagagggcacacgagctcattcaaggtggttgtgagccaccatatggttgctgggaattgaactcaggacctctggaagaacagtcagcgctctcaacctctgagccatctctccagccggttaaagggttttaaaatgaccagctgcattaatttaataatttttagaattgtattttgaacatggctaagataataaccttgaaaaacctgtttttattttatttttttaaattttttttgttttgctttgtttgtttgtttcgagacagggcttctctgtgtagctttgtagatcaggctggcctcaaactcacagagatctgcctgcctctgcctcctgagtgctgggattaaagacatgcaccaccactgcccggtgaaaaacttgtttttcaaaagaggaaatagcaataaaaatgatcctaaaatgtttatattcacacacacacacacacacacacacacacacacacacacacacactcgtgcatgtccccatgacttaaagttaaggatatgtcaaggatagtgtgcactaaggtgcatatatatatatatgaaatagccacagatttttcacttagttatttttaggaattttagggacagattgagttctatccatgaaaacaattgcagtgatcatgaacacacaaagtagaaacacaaagtgttcttcttagtaaaacaatgtagaaaacatgtttgtgtttttaaggcccagatggaaggttaagcttgcggcatcatctttcctgctggagacttacccagcagactccatgtgaccaggcttgggtggaggggtttgtttactggggaaagtgaatgggaaaaggggaaggggagaagggagactggcctcgggacaggagctgcagaagagaagaaagaagcagagacagagacagacagagagatggaaggagagagaatgagagacagataggcagagcagttgagagagagtgagaaggagggaggaggatgggagatgggcagggctctcttaaaagggaacatagtgaatgtgcacaggtggtgctcgtagtggctgcagctgagggcgtatcccgtcagaacccccagggcaggccactacagatgcctgagtattaacagactcaaagtataacaggaatttttgtatggttctgggtctctcttcccactgggttttatcctgaaacagcccatgacagtcttttcctttgatacagtgttgttctgcctaaagggagaggcaggacggggaaagagaagatgagaacaactagatttctcagaatgtatctagttcatccataactgctaactttttttttattaattagtttcctattcagtatccccacccccctttttattgagactgggtttctctgtgtagctctgtctgtcactctgaagaccagattggcctccaactcagagatccatctgcctctgccttccaagtgctaggattaaaggtgtgcaccccacacctgacatatattccaatcgttatcatagtctgatgtggttgtgcattatctcaagtcgcggggggcaggggcaggaggatcaggagttcagcatcatctttagctggagggcgctgatccagccagtggtattaatttcaaagactccttgctattggagtctctctcttcatagcattaagggagggatttgaataacactcccagtaaggttccttgtaacttagatttctgttttaattatgataaaaaaaatattaaccttggaatgaatcagaagtctatgattgcaagaaaccaaagccctacacatgtccacaggcatcgttcttctggtggatgtaggtgtctgaggacactgttatcctgaccgcagccttttttttttttaatcattttttttatttgaattagaaacaagattgatttatgtgacaatcccagttcccttctccctcccttcctcccctaccaccccctcaactaaaaccctacctatcacatatcctttcttctattcttcacctgactcaacctttctgctccctcatgacctctgcatccttccttttcttcccttctcattctcgtatctccctcccccctcttctcttgctctcaatttgctcaggggatcatgaccctttccccttctccaggggacaatgcttgtctctcttagggtcctccttgtttactagttctctggcagtgtggattgtagactggtaatcctttgctccatgtctaaaattcatatatgagtgagtacataccatgtttgtctttttgtgactgggttacctcactcaggatggtttcttctagttccatccatttgcctgcgaatttcaagattccattgtttcccccccccccccccgcatgagcagcactccatgacccacaggcccttctaatcctcttttccaccagcttttccatgtgacccagggtaggcaatcctctgagttactcatcctgcattgtgggtggcttgtccccttgatctcaggcttgggtttccattggctgctgctcctcttggttggattaaaccagagtggtcaggaggaaccaggccagtgtcacttcattccctctcaggcagatttgataactgagctgttcccaagcagtaaagcagggtcggtggggcttctggaatgcaatcagggaggtcttggcaagcacagctctgcaaccagcctgctggaaacaaggtgggatttaggaagcccatctgctgagggttaaactagtgagaactcagcattcattgatcccagattatttatggaaggcttgcataatggtttaggggggaccctgtgaatgtgcctaaggccgaagtgtgtatacagcacccaaaaatgctaactgaatggagcatatatggtaccccaggagagacatctcttatattccaatctgtccccaacacttccaactgtgtgaccttgggaaagagtcttcatgtctctgtgactcaggagtcaaatgcaaagtgctcatcttggaagctttctgaatgcactctgggggcacttcataattgcaatatttgttccattaaatgaaaagacttgtagaacactcctgggaagctagggtgtgtgctatgtgtattcatatttgtgtgcgtatgtgtacttgtgtatgtgtgtgtgtttgtgtgtgtatgtatgtgcttgtgcttttttgagcattttaaaggcaaataccagacagcatgtttttgcacccataaattctcagtttatgcctgtagcagaaaggaacttaaacaccaaaataagaattaaaaacccaccttgaggcaatgctattattacatatacataaatagtatttccctagtgttactatatcctattcacattcaaattcccctttctgatgattttgtttgtgattaaggatgcaggatgctttggaactgagcatccttctggaaaactcgcttttcctcctgcaggctggcaggggagggtggtaccaccacagcgcatgacttgcacatgactggaaggtcatactgattccatagcgccccgatattcccagagcgaggtgggaactgaggctttgccacactgctgctgtgtgtctgtcttctgcagagagggaaggatccatcggcaccaatactcttgccaggcggccatcaccaccaggacactcgattgctctttacagctggttttcaaatcagaatgcaaagttcacaaggtgtttattttgcattttacgtatatttgcttttaatctatgtttacttccttaatctctgatctgttccatgaatcatttatcctagacattttcctgcctcctcgattttcatgattgctctccatggggtcgacttttcctctatccattacattgcctggaaaatggtccactagatccagagtcttgatactttttaaaaatatttcaaattagtgctgagttaggtcaggagctacatagtgtctgcttgttgtgcttttgtcaatggatcagtggactcagacattggcaacttgatggcaccatatctaaagcttctcaaaaacattcaaccactgaagactgttcctagatcaatcgctattagctaagtggaaattttgtgtgtttccctatatttgtaatcactgacattttacatgctatttacctgtattactgtaacttagtttagtgtgcttgatctgatgctgaggtgactgaagaaaacttcagttgtgtctccaggttgccctttcaaggctcagcatccttggagtgctgttgggtggttcctgctgtatcagaaacttgaacaccaagacattctctttcatgtgtgtactaaggatgagtctgcatctcacagatgacctgacatgattataattattataacacttgcattgtggtttgacattatttccccttctgtgggaatcatgggaagaaatattttaaagggagatctaacctactatgatttgggaatttgagagaggagaaaaggtcacattatcccataagtatgccactcatgtcacaaatgcttctaaaaacttcaaaatccacaatgaataatggagtagggcacctgtcttggggcagtccactctaatttctctttggcgtatttgctttgtttagcttggttcaacaaacttctgcttaaactgttcataccatttgactaaattctttgagaagagacctataatagacagccctccatctgtctatagagtatcttttaatttccttacatgggtgacaataaaaaccaatgtcttcttttccttttataagctacccactttcttctcctggataattttagccaatattatttgctctacttttttattaacataatttctttattgaatcttggggaatttcacatcatgcagcccaatttctccatatcctccctttgcctgcagcatccacccatgaaaattaagataataaaaccaaaccaaaccaaaataagcaagcaagcaagcaagcaagcaaagagaagcaaaaactcaaaagatcaacaacaaaaattcccaaaacaaaacaacaacaacaaacaaacaagaaaccttccttgctcttccatctttcccgcctctccaacacctctgcatttgtcctggtggcattgggggtcatggtgtgtcacagagtagacccttttgtccaatacgctttcctatcaaatgttcattgcaatgagtcattggtctggttcaaggcctctggtttctggtagaccatcccctggaagaacagttagtgctcttaaccactgagcaatctctccagcccacaagacccatctttttatttcctcatcttccctgacaattttggatgtttctactcagagacaaagaggaacacaaacagactgtctgtaatcctcacaggtctgctcactcagctctgctccaagtttaataggggtggtgtcctgttccccttgtcctctgtagcgtaatacctgatgcttgataggcatgtttcccctgagtgttgacacacaggtgatcattgccttcaaggaacacatagtgcaacaggacaaaccatgtaacctaggtgtcggccacatggatgttccatgtttgctttcagataccatcttgacttgtagttatccacagcaccctcaaaccctttcccatgtgctgtggaaagtcgtggtgaccggagcctttccctgggcattcttacctcttatgccagctcctgccttttaaaagtctcaaccctcacttctggaagcagcttgcttttttttctccttttcacctgggatggaccctgccctatttcatttccttagactgcacttgcacacagctctctggacacacaagcacatgtgccccagggtggtgtggggtgtaggctgtggctgtaggtggtgggtgtggatggggtggagtgggggtgtgggagaataggggtgatgtgggaggagaactcattgctctgtccagcacgtagcacaaaagcacatctgagtttgtaaacaccactccctctgtctagcatctgaaagtctctgctttcccaggaatgctagcctctccatgtctttatagataccaccgtccctcttgctgggccctctccttgctcccttgcaacaatgtcacccatactcctgctttttctctgctgtcttctggcccatggaaagtccagtactccagtactctccatagtgttaggtcagggatctagttcctttagagtaatttctctgcttcctcgccacacactgggatttcctgtggccctgaagtcttgtcagaatgttttgctaaacaaaagtcaagagtcaccctatggaaggcctcaccccttagggggagcagaaaggacatgtgataggtagggttttagttgggggcagtagtaggggaggacgggagggagaagggaactggaattgtcatgtaaaacaatcttgtttctaattcaaataaaaaaatctgcaaaaacaaacaaacaaacaaacaaaaaacaacaacaaaagtcaagagttcttcctttcctgcagactcccttttctatccacactatcacctctgacactgcactggaccatacccccatgacagttgtgtggactctgatgtctccaatatgacattcttgaccttttccatttccacccagaatgttctttataaacaataatgtgatgactacatggcatcacttcttaaaatgcccctggggtactccactgtccctcagaaacaccccagatctccactgtggtgaatgtacccatgacacccactgtccctcagagaacaccccagatctccactgtggtgaatgtacccatgacacccactgtccctcagagaacaccccagatctccactgtgttaactacactgtggcaccccactgtccctcagagaacaccccagatctccaccgtggtgaatgtacccatggcacccactgtccctcagagaacaccccagatctccactgtgttaactacactgtggcaccccactgtccctcacagaacaccccatatcctcctgtgttttggtgactgcacaggtccagcctggctgctcctcctcctctcatgctgtctcctctctagcccttggcagtcactggttttcctgcagttcctgggaccccatttctccctcgtgactgggtgtggtcacttccttcctcgtcatttctctccctcctcccccgggcctctgcttggggagagcacccgggcagggcctttccccgcttttgtcatgcccacactcttgaacaacttttgtccagcatccacttttgtgtaacttccagctggactgtgtgctaagtggaagaggagcatcattgcgttgttcattgttctctctccaacagtgtctggcacaaatcctcactaaataattacaagctgaactgaacagccacgagaatgctacgactgcttgctggtggcgtgggaatgggtgctaataaaacaaaacaaaacaaaaaaaaccaaaaaaacaaaacaaaaacctcggtaactaaaatatggaatcctgactcttttgaggaaaccagtcgtgctatatcaaatccatatgcaggtgttgggattcaccctctaaagggggaggagtgttgaatgcagcggcgcccatctttgcttttagaattattcaattgcatatgaaatccctcagctcctgctgatgaagtgatttcttcggaaaattggctgccttccaagaggaaggaaggccccctgagatgcttcccaaggagatgaaaggatttccggaatagcagtttaatgttgtaccacatatgggattttcaaattcacagctggttggaaaaccatttctggcttcaacccatttgagttactgcctccgtggcttcaagtaccccaaatgttaactcctagttgccagggattcattttccctccctcatctgcttcttgctttattctagtgtgtgaatctaacattaggctaagcatcctcgtaggatgtaggctccatgggttgagggatgtagcccagtcagcagaatgtttacctagcatgcatgaagtctctaggtttggtctccaggtgtggtaacacactcataacccaagcagtgataacaagggctcaaggtcattttctctacacaaagaaagttcaaggacagcctaacttacgtggtataggctccatggaggtgggtgccacacctgttcttccatttttttctacatagtattgaataaatgagtcatccatcaaccatcagtcgatataggagaacagcagctcaaaccctcaatttaaatgtgctcatcctagctcatgtcacccattcccgagagttgtgggatagttgattgtactgtgacactcccaagactaccaataaagtttgctttgaatcagagggaggagctagttactagctgaccaaaattagctgtagaggttttggaggaccaaggacatatagagagacacaggaagtagtagggtggggcttagaaagattcttgacccctttgcagaggtagagagagagagagagagagagagagagagagagagagagagagagagagagaggtcactggttgcttctctgccatttctccgctcattcaggttattaccccgatatcagactcccgagtttccattgataaacaataactagataaatgcttcacactccctccctattcagttactactgttgtgtaacaaccattccaagatatgctggctaaacaaaacaaaacagaactttcctattatgttcaaagatggaaatttaaacagggaacatggaatatggctcatctattcatgtgacacctggggcttcagttgtgtcagctacaaggtgagggggtgtggcaggtgggctgctttgacttgacctgggtatggtcgctctgtggtttgggcttctgcacagcatggcagcatcagggcaatcagatttcctacgtgacagaagatcaatgggtcacatatggcaaagcatattatgtggcagaacactaaggtccattctaaaggcaaggtagaagcttcatgactctgaatgactcagctacaaaagccagagtcagtttctgctgattttcattagtaaaagaaattacaagaattctgaggtttgaggggagaagtcaccttcatgttctgatgggaacatgaaaaaaatgcatttagaggagaatatgggctgggagagatctctgcagccgtctgttggaaacacaatctggtgcaagctctccatcctcatcttacggataaagggtgatggactgtcattagtggaagctgaaagatgactttcagtcaaggtgatcatcatgggcccttcccaggtttcactgtttttctctctccatccatttcattttttttaaaattacatttatttccttggcatgcatgtgtgcatgtgcatgcgctcgtgtgtgtgtgtgtgtgtgtgtgtgtgtgtgtgtgtgtgtgtgtgtgtgtgtgtgtgtgtaggccagaggacaacgtgactgaaattggttaacctccatcatatgggaacttgaaattaaacaaactcacgtcatcaggcttggcagcaagtgcctttgcctactgaaccatctgacaagcccttggctttgttatcttttaatcatgatagattttagcttagaaagctatgttttagctaaacactgaactgaactggaatccagttgcagagagggaggagtgatgagcaaaggggtccagaccaggctggtgaaacccacagaaacagctgacatgaacatcggggagctcttggcccccagactgatagctgggaaaccagcatgggactgatccataccccatgaatgtgggtttcagtgaggaggccttggaaatctatggggcctcttgtagtggatcagtacttatccctagcataggaatggactttgggagcccatcccacatggagggatactccctcagcctagacacagggggtgggcctaggccctatcctaaaggatatgacagactctgaagaccccctatggaaggcttcaccctctctggggagcagaaatggtatgggataggtagggtgttagtggggggcaggggaggaggggagggagaaggaactgggattgacatgtaaaacaatcttgtttctaatttaaattaaaaaatggaaaaaaaaggaaagatgtttttggtataaatatgtaggctagatgaaagtgagatttttgtctatttttgaaacaatcaaggcattgataaatatgtcctgggggaaataaggactaatgagcttggaaaaacttgtaggaataattttcttcttagaaattaatgtgccttattagcacaaagcctgagaagtcgtgcatcaaagaaatcttccacagggcccatgggaggggaaaagggaagcttcaaggcatggcagtggggggatgatctgaaggtgaccaagagaatacggggtggggggtgtctagggaggtttaagcaggactgtggggcagggtggtaaagcagaggaggagtggggggcagcccaaagctaagtttgtataagaaaccacaaggaaacctgctgctttgtgagctaattaaaaacaaagtttagctagaggggctgtagtcaatgaagaacctgctgcacaaacacagacctgagtttgaatcccagccctcccataaaagctgggtttggccatgcacatctgaaactccagcgtggggctatcgggggagcagagacatagttggggctgtcagccagagagaataaataggaagagaaatctaggctcaagaggaggaagaagagggaggaagaagaaaaagagaaagagaggagcatgtcaggttgctggtttttcttgtcctaccaggtcctgctgcttcagccccaaatgaactcacagagacttatattaattattaaactgttggctgattggctagctctgtcttaattattaacccatttctataattctatgtatttccacgaggtctttgcttaccatagaatgtccagacccgtttctcctttggcagctacgtggcaactctttgaggtccctctctgcctacctttcctagaattctcttcatcttctagccctgccgatcttcctgcctctattggccaaacagtgttttatttatcaaccaataagagagacatatatacagaaggacactacccagtcacatagccaaccatggagtaagaaggaaagagaggtatatagactagagaaagacaaaagcccagaggcaaactgtagttagaaaagctgactagacacaagccaagctaaggccagacatttataaataagaataagtctctatgtgtttatttgggaactgggtggcaggcccccaaagagaaaaaaaaatcagctacatattggtatggtagtaacaagactgttttggagggttatgaatttgaagctcatttcccagaagggaattcacatctgcaaggaactgcaaacctgctcaaaagcctgtggttggggaagacataggaagccatgttgttgtattgctaaattgacacgataaataagcctgtcaagttgccttctggacatctctaatgcccactgtcaggtttgattagtgaagtttcttttgcaactggaaaatgttgatgcagactcactcacagttaagctacggactgagaatatgtgactggctagtgctcaccctaacaagggtcgtctatgtcatccctccaaggctcagggaacatcaaagaagaagacacagaaagaatataaaggttagagaaagagctggaatgccgtgaaattctggcacatggttgcactcttgaactctcagcagctgtgactaactgcacaagattgagcctgtctatgcaggcatggtggctcacacttttagccatagcactctagagcatatgcaggcagactgctatgagtgtgaggctagcctggttccaggtcacggtggttgcatagcgagaccctgtctctactcattcaaatgaatctgtgatttagcctgtcagtattctgtcttgaaagagggaagggctcataggctccacttctccctgaggatctgtaggtatttcataattgctggtgtggggtaggaaggggaccattttcatcagaggtgtagctactggtgagttgccccatgcacctgccgagagttcctcacctatgcttctgtaagtaactttgattaaacttaccgggacaccagaaaacaaaataaaacaagacagccaagtagaaggggactagtttggaagaggagggtaaatttgttcaaaatgtgttatataaatggataaacatgccatgatgaaactcaagctcaacaatgaaagaacaaaactttcaaatatagaagaaaagagagaatcaatcaagttttcagattctaggggtagggttgggggaggaaccaacaaaaagaacttccactttttaaatttgggcaccggctggatcattaatgactatgatttctactcctgctttgatctcttaagattgcatttattatttattcattttgcatgtatgtgtatggatgcatgcgtgtcatcggatgtgtgtggaagtcataggacaatttgtcagagtctgtgggttttgagtatcaaactcaggctgtcaggcttggtggcaccaatctctacttgttgagccagctttttgttcccctgctgtgttcgttaatgaactggaacttattgggccttgatgtcttcatctatgaggtagtgatttgagtgtgtcctttataatgatgtcagcctgtaaatggtaccccacagacagcaattgctattagcattagtaagttatcccagcctcatcctgttctctcactcttccctagagctctactttgaacagaacactgcagtttacctcagagtgttcctccccaccctgcttacctcagggatcacactgagtgggagtgagaagcccagcccccatctcccctgtgcctgcactaagggaagggcaatggaatgctactgttgagaaaagcatttactttgggggattctcaagtagttggctgtgttttcacagacaggtaccttggagaaagctgtaaatcttcttgctcaccctcttctcaagccctgggtgccccagcagctgcagaggacactttactatttcaatccatctcctcagtggatgcagcattcacaaaccaatactcatatccttatagcaactgcattggcttaaatcttgtgtaaacgattgtcacagaatctggtgagatgggagaatgtcactcagggcacaagtaaagttgaatttgaggctcaggctggggcacaggctctatctttaggcaggggtggagctggagagagcataaaaatctgacctcaaagaaccaagctttgcccattaggttgcaaggcctgggcaagtcacttgtcttcacagccttggttttcctcacctaaaatagggctgggtattagctcccaatgatcaaaatatgcaaactttatgactgacaaggacacaaacaagttcatagcatgttttttttttttttttttttttttttttttttttttttgtaatagtctagcctgggaattacttgaatgtctactcacagtcaaatggataagcatgttatctgagattcacaggaaaatcaatgaggaagacaagagatatagtatatgcaaatacatagatttatctcccagatgtaaggtcaaatcctagaaggcacaaatatgaatcctatatggtgccatttatataaacatagaaaatctcaatgtaagattttagaaaggacagtggttatccttatgtctacatgtctacaaaggtcacagggcactctagggtcatgttctgcttctagatctggatgttgctgtcttaagccttattaaaaaataccaaacaaggggactggaaagatagctcagcagttaatagtatggctgcttttcccgaggacttggattccatttctagcacccacagccacatgtaactctagttccaggggaactgtaccctcttctgatctctctggacaccagtccacatgtggtgcacagacatacgtacaggtaaaacacccatgataaaaaaattcaaattaacatccacaataaaaaatttaaattaaaataacatacactaaacaaaacattctgaagagttgataggggaatccaatgagacttaggggaccagagtcccacttttggtccccataggctcatatgtttgaatgcttggttctcagtaaaactgtttgggaaggatcaggaggtgtggtcttattggggaagggatggactttgaggtgtaagaattcatgccaggcccagtctctgcctgctgtctgtagatcaggatgcaaacctctcagcttactgcccagcaccatgcccatctgcttcccaccatcagattctcactccctaaacctgtaggcaagcccccatttaaatgctttcctttataagggttgccttggtcatggtgtctctttacagcaatggagcagcaactaagacaccgtcccatacccttgagcaagtcaggtcccttttgtggttcacatcttccaacactcataaagtgatttcttgaatgagtcgagaggaagcatggcagtctctggcacagctattaccccccccccccccggctctgtaaagccttgccatgtacagcacacaccaacacagtcccttcttcatcatgggccctaagcaatgccaggtcagaagaccctaaagacactgcaagtctgtttgtgtttaccacgctggggcaatctctgaattcagcctcgcagggcagctgtgagggacaagatgttgtgcaaatgggacagagcttactcaggctgttataacacttgagggccagactgcagtccaactggcagagggagggactgccttgaagtgtggactattgatgataccaccaggtactcaaagctgagcctgtaagctgtccattgtgaaacaagcacagacaattacggggccaacaggctgagtgttgaaattggctacacaaaggaacatccacagagttttggcaaagttgggcagaggaggctcatgatcaaagacctctgtaggagattctgtcctgcctgcagctcctatgacagcttaccctgtgcccaacatagaccaactacatgagctcctgagctgggacagtacccaatgctctgtgagtgtcatttcctgttaataacactataagcttgttctgtttagtcctcccatcgcacatctggccaggctgacaatgtccccaggctggctcccagcttggcctgtaccagacagctctacctcttgtcaccgtgatttcttggagtcatgtccactctcagcaaggcctgcagttgcgacattatggtgctcagacagtttgtgaggaggttggacatcctggcactccaggcagggtggcctggcactgtctcgggtgaccaggatgcaaactgcccttcccttccccatggttttctttctgcttctgcttactggcttgatgcctctgtccaagccagacagaagggtggcagtggtatgaggccatgatctttacgacaattatgaaaaacgctatctaatgggcaaaagtgtgtgcatgcaaatgtgtgagtgtgtgtaagattgtctataaagcatctgaaaccatgactattggctagcaacaagcagtcagagcctcttaacgttgcttcctccctcactgacttcccctatttctccttaaatcctagtctaggcagttaatttacaaagcatcagaacatctaccaccttgctccagttcacatcctcagccaacaagctcccaggctctttccctgataatttcaccccccccccccacacacacactttagctctgagtcccatgcagctctgcaagccttctctggtcccttggctcagtgatacagaaaacagagatgagacatgaccagagctctccactggatagagaaccagaatatttatgtattacttcaccgaaagttcatggccatgtgcatggagtcccacagagagcagttatttctttgagtagaggtcaaggggatcagagggcagagaggtgaaaaataaaggctcttgtattggttcaacttggttcaaccaagtttaaaacttctgcttccttctgtatgacagaatcatgttaacccctgtagacatcaactcacctataaagtaaggagagtgatgcccagctcagggcagtgggaaagtcaaggattgtgagtttggtgactgccttctcgtggatgtccagtaagcactattttcattctcatgggaaaatcaccagtgaaaactttgaggccagtgactggccacacaccgtcacctttcctcacctattccatcagaatgtgaataggaccctttagggagaattcctgtttgggcgtggtcataggtatgcagaaaggatgggataaaagaactggaaaggaggctgtcgccctctttcagggccaagactaacctgggtttttggtgtaagtaatcttccacaataaaataccaatattattcttattacgtatcctgttatattttgcctacaggacccaacctacaaggttattgagaggactaaacagaacaagcttatagtgtgattaacaggaaacgacactgatagagcattgggaactgtcccagctcaggggaagacagcaagataggccggtagtgacagtttgaatacctggccccaactcctgtgttggaggcttgattcccaatacagtgtttcaaagtagggattggggggaagtaattgaatcttgagggctctgacttcatcacagattactttgttgatggattcataacttggttgtaccattgagagatggtacaaacttggaggtgtgccctgacatactttgtttctggtgctaccctttctctccacttcctggatgccatgaggagagcagctttcttctagcatgctcttctgccgtgatgtctctgccttaccacaggtttaaaagcaatggagccattgggtcatgcactgaaagtccaaaaccatgagcccaaataaacccttcctccctgaagttggtttggctgcaaatgaagtctttctcccaagaaagagtcttagacctcaatggctatgagatcacctctttcctttgtgattgattttccccatgaagtccttgatgttcataggagctgatcagtgacaaaacttaatgacttaggggctcaggctttgtttgtaagtctgtgcttgccaaacgggccctgggtgtaacacagcaacacttgctagtgctatggtcctgatccttctctcctggatgccttgtcctggctgggtgagagtatgatggccacagacctccattggggtccagacaatccctacagtctgagggctggccgagctgcctttctgggcatacttctggtctctggtgagcactggggcaaatgcccaaatcttctcgtcctgagctgtggggacctcaggcttctccgaatgtgtgtctcagcatggcaggtgaggggaccgctcctggtgatttggggagatgctcacacttgtctgtgatgatgtcctccctgggattcacaagtcacgtcaccttttgttgaaagaatagtctggctgtagactggtatggcttcgtagtaggagagcccaagggtcaccagtgttccaggctaaaatgaagtgatgcacaggtgtggctattactgttcatctgggtcatgttgctctcaggagctcaagtcagatctcagggatgacaactgttttctgtccttggtcatgggcagttgagtagaagacacagctttgggagtcctaccctggcttcagtggcaaccttgtttacagtttggtgactcagctctgggcctgaggaaatggcagtgggggaggggtttatttgcctttctctttgaaaggtctagattcagccctgagaaataagaactgttctatttttttttttaatgtactgaggttttcccaaagtaaacaaatgctggttattgattacctgacctacatttctcgtgactacagtggcgggtggcacttctgcagaggagggcctgggaagcagtgaccgactggggacaatgctgatctttcagtgaaagtcagatgcacccccaatctttgacacaaaccacaaccagcccaagtatatagaaactgtcttctcttctcggcattaatgctgttatacctgggaatagcagagcatctgaaattagttttcatgtacttcagataccatttaattaaaaagctaccacaggagtaattgtaggaaagcaatgaataaaattacagtatgacactaaagagcactccttctaactatgcccatagtgtcttcagtgggactgcgtggaataaaagtgcttttggtggtgggcacaacagtgactcccacatatgtccagctatcattctgtggattctgtgactgttacacggcgactgtgactttcttcatgtcattgagcttaggattttgattgagaaagtttctagggtcatctgagcgctaccagtgttagatagtcttagaaacgagacaggatgcacaagaatccatgctacactactgggtttgacgatgaaggaaggggtcatgagccaaggaacatgcatgacttttaggacctaaaaaaggaatcagatcattggtagggcttccaaaaggaatggcagccctttcgagacctcggtttttgctctgtaaggcaaatttggcatttatgatttccagagctccaggctgagaaaagggtgttgttttaagctcctgtagtaattttttagggtggcaataggaaaatgatacgccttcattcattggtcttgcatggggatctatcctttgatttgcccctccccaaatcctgacctgaattcaaatgtccttcttagaatcatgacacattgtggttcttgatgactaaaccagcactcttggtaccgccttctccacgaaccagttaccctgtgggaatctggcaaggttctaagaatcaagaagaaaagtgacaggcacaccctcccaacctccagggtgcgtgcacagacttcagacttagcaaagatgccagggaggtgggtggaggtgatgctcttgtctccatggttgaccatgaaggctctggaagtccctcgcctaaggccacagagtaggctaggaccagagtaaggatgagacggcctttcttccttcttgcagcttagtggatgcacccgaatccatgagacacagccattgtggcccatcagaggactgtctgaaaggtgacatttgctttgtcaggactatgccagtttgactgctgaccgattcttttatcaccttcttttcacaggttttgattcttaatacctttgtgttttcctagaccaatgacagcttctgtttcctgagcattcagactgtgatctcgagggaagttgggtccagtgaaatgcaaatgaagtggtacatgctattttgggcttggcttctgtgtcctaccctctcctttagctccctcgatatggtcttcagagataccctacagcagcggttctcaaccttcctaatgctatgaccctttactacagttgctcatgtggtgaccccccaatcataaaattattttccttgctatttcttaactgtaattttgctacttatatgaattgtaatgtaaatatccgatatgtggattgcccttaggctaccctgtcaaagagtcatttgactccaaagggtcacaacctccagtttgaaaaatgctgccctacagcatggtaggtccattggatggaagtagctgggtatcaggaagaagagatgccttgctaacccgagcatccttgcacaactcttatgtgagttacaaatgagcttgcattgtacatagccatctgttcgctaggtcagctaatctaccctggcttgtcccctcatctcatctacctctttagatacatacagatggaggagttcaaggaagacgtgtctctaaatatgagtggtcattgccaggttgagtggacactcgagggctttctatggctagactgaggcttaagtcagagatccccagaccagatgattacacagaaggacaagtcctggtgaagcttattaagtccagctaaactcaattaaaatgtagtccaatgctactaagttgttatcaattttaaaaagcagcagcccccttgcagggagggcaacaatcatagaacagggaaaataagttctcactctaataaagggaataaaaacttccctccccttttcaataggtcaggtttggaatggaacatagtcaattctcttgcctatggagtcatccattccttttaataattcacagtgatagatggaagacacatggtataaagttgtatacattgcatgtagctaaaaggtaggtggagatcaaaggtaggtgagggatggcagacatgtgtagacagagaatacattgctgtctagacggatgtctagtgtgtagatacagaagacatggaggatagacattagggtctgttctcatggttacgtaactagtacctgggggtgggagtgggaatggatgactacaaactgctggagaactggcagtgtggtagtcatggaaatcagacagcttctctactcatcaaacaagaggggaaccaatacagacccagagatggaggcatcctctgaagacccacacaactccagaagagcaaggctaagtatccccagatcccaggaagggttcctgaagagaccttctttccatgccctaactaggaattctctccagaccatatagtcctcttctgagcccgtccccattgcaccagagcactgagagaaattctacatgtgagggtcatcaggaaagatttcacaaaactcttgaactacacaaatgtgggagctgtccctatatctgtacttatttctgttgctttttagcattccagagtagacacaggaatgagaggtcatttgcttatgctgagtaaaacaaaggcatctcttgggcttgcagcacctgcaaagagttttcttttctttcttttttttcaagacagggtctctctatgtagtcctgaaacctgctctgtagaccaggctgacgttgaacacacagagatctaccctgcctctgcctctgtgctgtgattaaaggcgtgtgccaccactgcccagccagcggagttctttagccacaaaaccaacctgttggcaggaggattcacacgggagagtagccccatacaccactctgtcaccaaaacttgtaattatccatgtcccatcatacccgagggctcagtagaaaatctgatgaaaaagccttccacattagaagcttctccagctactgcagaacaactactgcattgtatcgacataacggatatatactttgcatgtacgttgccatggtacttagccattgagaatatgccatgtaattgcccaactatgctgtttatttattttctcactccactaaaatctaaggtgaaaaaggcaaacacctagaaagtagtggatggtttacatttgatatttattgaataaaaactttaaaaagtgaaagggtacataaccccagggctgtgacaaccctttgggacatgcatatgtaccttcacacacatttatacacactcctatacatgcgaacactcaaaatttgggtcataccaattctgctttactttcttttccgggtgtggggtagccacctccacttattgtttgattcatttgcttgtttgattagtcacaaggtaattggaggtgggcaggttaaggctctgtgtagtctggagtgaggagactacatggatagcagttgggacaagggctccagatggattttcttttttgaaaagactcatttttgaattatgtatccatgaagagggaggcatatcccttggagctagagttacaggaagttgtgagtagctgactgtgggtgctgagaaatgaatttgggtcctccgcaaaagctaagtgttcttggtttttttttttttttttttttttttttttttttttttttttttttttttttcgagacagggtttctctgtgtagctttggagcctatcctggcactcactctggagaccaggctggcctctaactcacagagatccacctgcctctgcctcccgagtgctgggattaaaggcatgcaccaccaacgcctggcaagctaagtgttcttaactgctaagccatctctccagtccccagaagacattctcttgaagctctatactaagtcctgaggtcatggcaggctcaggtttgtatgagtcaatgtgacaggctaatatttcgagagaagctacttagccatgtgggtctctagttactgccactgatttactgaattgcacctgtgcagtcaagaagtcagatcagatgttatgtggctttactgatccagctctgtgggagatgtttaatggggacataggaaatacctgttcttgagcttgatgtgcacacacctaaccatatacatctgaaaactctgatgcagcctgagaaatgagaactgacagacagtatttgccttctggttagacgctttgtttgtggggtagtggtgaggcaggcttagcagtggggagagaattctggtttggggaaattacagaggagactggagttgggtgggaatggacagaaactgactggttggttagaaaggaacaaaaaaaaaagatacctggggaggcagtaggctgagcaggcaattggagagtcaaacaagcactggagataccttagattctccacagggagacagaacaatgaaaatagaattttaccacggttaactgtaggttttaggataaagaggagagtaagcctagggaagccagctgactatgagtggttgaatgtctacctaaaccaaagaagagtcaaggctgagacaacataaagacaaagcttgttgacaggaaagtcaaagaaaaggaaaagacatagtaagaccaatgtttaaaactcacgagaatctggataagattgcttgagacagaaataatcaagcaaagaaaacacaggaaaagacatagtaagatcaatgtttataactcacgagaatctgaataagattgcttgagacagaaataatcaagcaaagaaaacacattagcagtctttccaattccctaggtttaatgggaagcatggcacaaggttttttgatacaggagcaacaacagcaatggcactattagcgatcctagagaacacttaccagtcagaaatgaaggtaagccatttgtaatggctaatctgggctgaaatcaactcaaagacaagccgctgggtgggtctttcctaggatgattaatgcaaggggaagaccctccttcaggaatgggcagcaacttccagtggcagccaggcatgaaagagctccatgggaaaagcagtgggcttctacctacgcgcctttactccttgctgagtgcatccaccctgcttctgccactactgggccttccattatggaccaaagaccagcagcttttcaggaaccctcaagatcttcagcaccagaatgggatgttgagtcatctgtcctttggatgggctatcagtctctctggagtacattgttggattacttgcatcatataagccaatctgatgaacctgctctgtaatatatattcatcctatcagtttgttcttttagagaacctaagacatcattcataagcatatacttgtattacatatctgtatctgatacattaatactaatacagcttgttgaacgtgtaccttacacatattgatattatatattaggtgcataaacacatacacagatatttataaattatttaacaactatatgggttcaatattttaatttacagatgagtaaactgaggctgtaactcttgtcaacaaaggattaataatatctagaataaagaagtaactcctaaaaaccaatgaataaaagtgggcaaagcatctgagtggcttgtacatgtataaatggtgtttagtgttgttagcaacatcaaaaaggcaaatttaagcacagtagtcacataagcaaaactaaaaaaaacatataacaaccccccctccagccccaaatctccaagtcccctaaaagccccactgaaaccaagtgctgagaatgtggagaaatgacaagtctcttacaatgctggtggcaacaaatgctgcagccaccagtctggggaacgagcagcaagacaggcttttccagttgagcagctccacctctggaacatgctctggggagactcagtctgtttaatcacaggcctctgagcctggctcaacaaactgaagagtggccatttaatagactattctgtgcatccaggtggatgtcaaaatttaagagcagatagacaggagcataaagatgtattgttttagtaaaactgttagatctctgcagattttttctatattttaaatttttcattaaagttctccgttttcaactttttaaacacacctgttacactgtataaagcagcattagaactgttgtgtagtacagcatcggtataaattcttaaacctgtgtgtagagtaagattttccttaatcatttttatgcttcaagagctccttgtgttctttaaaactggttgaaaccaatgtatgagacaaacccccggaatgagagccagatggctgagaggctgtgggctaagataggatcgccccagcaccatgccacagcctttcccgttgtgcactgtatgccagtcattgtgtgtccacacattaacccccttcaccttccctaaaaactgcagagagactgctatttccatcttacaaatgatttctacttttcaatggagacattgcagttaaacatgaggttaaactctctgccttcaaagcctagcactgtagtattgaggatggatggctagctggtttgactgacccatgtcctcctagaaaacccacctttctcagatctaggttcaaactgtagcaacatagtaacttaacagaatccatagtaggagcagggagaaggttcaatgagtaaagagcttgctgtgcaaacgcaaagactggagtttgattcccagcaaacacatcagagtggaggtgcatctggagccccagtactgggagacagggggagcctagagactcatggacagccagtctactgcaagtagtgagttccagggtcagggagggactctgtctcaaaaataaggtgaagcgcaataaagaatctgacatggatgtctgcttctacatgtgtgtgtcttctgtttctctgtgtctcactctcataacccataaataactcctaaagattatttataaggaatcaaactcctaaatgttagaaatagatttttgtgatactgactatccacagcattctctcctcattttcagtatctcttctctttcctaagcttggacaatatggacaggagagaaacaaccaaaggaatggttctaagggaagaacactgaacatatgaagttgcctatctgcagtcaataaaatgtcctaggatgtccacttccgggtgtactccattgctactatgtatttatttggtaagacatcttatctatgtgaccatttgatggggggtgtccttctgtatacatgtttctcttattggctgatgaataaaacactgtttggccaatagaggcaggaagattggcgggactaggagatgaggagaattctgggaaaggcaggcagagagagacctggaagaggtgctatgtagaccacgaaggagtaacaggtcctggcactctccagtaagccaagaccatgtggaaatacacagattaatagaaatgggttaaaaattaagagatagctagccagcaagaagccctagccatttggctaacagttttataaattaatatatgtctcagtgtgcttatttggggctgaagtagcagtgggtcctggcgggacaagaaaccttccagctacaaccattcagttattggatatgtgtctcatactaagaatatgataaggcaattgactatactgggtgctgttaactacatagcttttgaagctgtatgttttagaaattttcctaatcacaacatcttgtaaagagcagtatgatttatattttaatcttgttttaattaattgcccagagtttaaaaaatgaaatgaagcctgactgactgtataattttaatatttgaaaatgtttgtacataaattaacttaatacaatacatatttgtacaaaaggactgctaaaaacttatcatacagaaaaaaataaataggtcttttaaaaaaggacaagacattttataaatactaataaatactttgcaatgctttaatttactacggcagatacaaaactcaagatatcattaacagatatatatttaaaaagctacatgaattttctagctgattaaattaaaatgtaacagtagtggtttttacttttaaaatgaggtattattacattgtaaaccaaaacagagcataaatatatgacttattaattaatggttataaatttcaacttaataagagacaacagaaatccccaatatttatggactttgtcacttaaacttggcttgcttgtgtacttactaaatgtgacatagctatcaatacacatacatcattagacatgcagaccaagccaacactatttccatgagtcatctctaacagataagaactttgtttacattttacctaaaacacttaaatctggtttcgtatacatgattctttgtgcttgttagtagtaacctacattagacatggtactttctaattcaagcagtgcaagagagaagcagttttatttgcatatgaattaaaaacaatgtatgaaccaaacccaatgtgcctttagctttctgagattttaaagaactatccgtttagtatactcaaatggaaaagtagtcatttgtggtctcaagcagcacagggagggaaactaggttctagcaggggtgggtgggtttcagaactgtgggcaagctgatgtgttcctacacccttgaattctgctggttgggtgcaggaagcatagcaacgaggagaggcctagctctgagaagattcgggccaaggattagttgcacatggatcatatgctggtactaaatgctggtttcattcttattgcaaatgttaaaacttcagagttttctgaagaaaagttatcaaagaatgagagaagtcttgagatggaatgtttgtaacatggcaataaaactgcttcattcgctataacttgaaaaaaaaaacttgggacttaaaaatgcagttttacatgctactttattagaaatagaagacaagggtacttttgaatttactatatttagaatccagtgaaaaacaaacattttagccaaaatgtcaaacttttcttttataccaagctacatcattttgacacaaatgtttttattgtatttcactcttgtcaaataccttaacctacatttcccaaagtttccatataactggtgatcaaaaatgtaggtaagttgttcatcaaaatatataaaatggcagttttttgtgcttgtaattaattaagtagcaatgactagttcagtttaattttctctatcttgatttttaagaagaaatgaccattgtagaaacattacagattactcaaatatcccatttactgccagtgagcatgcagactaacaatacttaaaagaatataaccatgaatccaattggtctgaaaatactcttgtacaatcatctttattgatttgtaaaagctgtatacacatctaaaaccctaaatttactttgtaaaaataaatctttagcaataaatggcactatcaaaatcccatgattcttaggctgttatgtagttatttacatgcttttcagcaacagttgaaaagatcttataggaccccaaaccaatatatcaaaagaccctgtaaactgcatttgcaattacactgttgtttacctttgtatgaaaatatggctacatgctttatggtaatgtagctatcttctttgctacagtgtgctgccagcacacatctgccactgggttccatcatgtcataatgcactctttagtgcatgtggccatcccagtggacacctgtgactaactacatatggaaaacaacgaaatgctatagaaaagagcactggacccaggactgtttctaccatatgctcgtttccttacactattaataaatttgtttttttaatcatgccttcactatacatatttcttgtatttgagtaaaaaaaaaaccctcattattttaaaagtggtgagctttgtgaaagtgttttaaaacagaaaaatgaaaatgttaaaggcacaataagagggaagtgaatgctacatataaaatactgtatttcaagtcttctaggttactcaagtccaaaaccttctgaatttgagattccaattatcagtttctgtttcagatcttttttgctcttgtatgggggaaggcagagttgattgaagcaagtgtgtgccacaggtaacctagggaaaaataagtctttgaggaatactgtcttaaaacccatacaaaaaactgagacattaaaaatcactgcatatattcagctctattttactgttatgtgatgactcagttcttctctattggacagatactcaccgaatacttatgtatcaagtgacattctagacagcaggaacatgtgtacagacgagacaatcttgcatgcctgccttcattaaactctaatttgaaaagcattttgtttggagtcagacagatttgaatttaaatacttttcccctcacttaccaactgtgggactttgttcgaattgcttaatgtctccaaatctgtttcctcatagatatggtaaactctgcacttacattaaaagaataagactgcaaagtaataaacacctagcaaaatagtggacagcatattgttatagttcagtcttgattcatcagaaagacatgaaaactattttgggctttctttcaaagctgttgttctctgcacatgaagtattaggtccttgaaatctcttgatcagctcctgcaacattctacctgatgacactgctatcttcactggagtttctaaaggtatcccagatccttctcatctgtttttaccaactccacagcagcacaatagctttcactaaagtcagtatgtaaaactggagaataagccagagaacactttaaagaactctgtctcgtcagaaccgatactgcgagaccatacaaaaagacaaacactaggtcaggcatcatttatggagccccgggattaccattagaactggagcatatgtctgatatgcactgcttcacttaagccccaaagcaacctaaaacagttgctatccccagtgtatggatgaggaaacctagacatgggaatatacagatcaagtattcaaagctacagagctggagagggggaagcttgactttcaaacccagtctagtgtgaccccaaaaccagtgctgttcacactcaacacacatcgtcctcaacagtgtgtgtaccttatggaagggctgaaaattcttagtcagagggaacgccgtcactgtactggatggaaatgtcatgtacctttgacagtcaattatattcaatcaaggtgaggttcctgctgggattctagagtcagagctaagccatgttagctcctaaaataatctctcaagtaaaaataattggagacatttatgttgtctttctagtaaaaataagctattcatattaccctttaaattgatcatattttagttgctataaatattctaaaaaatttctgttgaacaaataaatcttcaaatgcaaaaacttctcttgaagttttctcactttagatcttttaattatgactcagacagaaatttcttaattatatatgttcatttgtgttttgaaatataatcatttgatttacttgtgtgtgtggggtaggctcatgcacacgtgtggtggtgcacacactcacatgcacattcatatgcacacatggtgcccagggagggtcctgggtgtcttttctctagagcactctttgcctttatttcattgaaacagggtccccggctgaatctaaaacttgtctttggttgggctggctgtgggcaagccccagtgatcctcatatgtcccccgtctccctccggggttagaagctaatggccacacctggctttttacttgggtgctgggaatctaaactcagatgtttgtgcttaaccatggagcaatatacctagcaatatacctaccagagctaaacgactgcaatgtaaggtgaaacataaaaaaggaatttattgagagaatgacgactttttggtgtcacagaagacaacaatatggtgaatactcaactgtcatcagagaaccttcacccagtaattgatggaaccagatgcagagatccacaaccaagcaccaggccaagctccgggaatccagttgaagagacggaggggggacatatgagcaacagaggtcaagatcttgatggagaaatctatagacagctgaaccaagctcgtggaaactcatcaactctggcctgacagctgtggagcctccagcggaatgaactaggccttccatatgtgggagacagttgtgaagcttgggttatctgaggggcccctggaagcagaaccaggatctataccttgtgcatgagctagcttgttggagtccattccctatggtgggatgtcatgctcaactttaatgcagtggggagggacttggccccaacttaatgtgccagactttgttgactcctcatgagagcctttacccattgggagatgagtggatgggggggggaggctgggagggaggtaagatagggcaggaggagggagaactaaggttggaatgtaaaatgaaatttaaaaaaggatcttcatgagaggtagcaagcacataccacatgcaaagggaacaaatcaaaggaaaggaggaaggcaggccaagtgtgtcttaaggatgatgcaaaacagtgtgtgggcgtaaacagaaacgatgaactctaggaatgggactgttggggaaagctactaattcccagtgtgttagagccagaccagtgtcacagaaaagaagttgcacaggaacctgagcaggataggaggccttaacttagctaggaatgaggtgaaaagtaacagcaccagggtggtggcaactgggaaaacacagggccaactcaagttctaaaatgaaaggactgaggtgggctttgaggaatgttcagtgtgtgagctgtgttataatgaaagctgtgtctatttgaagttctttttgaaggcacagaatattggaatgggtaaagaccagcgttaactacccattaacactactagaaaagtcatggtctttatcacttcatataagcatgagatttaaaagatggggagtaccagaagaacttaaagtactaaaacaatagttacctctggcccttccaaaaatctcaacttcatatatttcctaattataaaaatcatttatacaaaaaatgagggatagacaacatgctactactaggcaggcaaggttctagaagagaccacaaagcactccttgacccaggctgtaagaagcagatggagggaatcacctgcagtgctgggatgtgtcaaccctgcaggggaactttcagccacagtctcttccattttaaggtcacacttgaccctcacgtattttacatgaaaattacttcagactaaaaggctcttttgattccaaaattagtaataagctatacattaaaaataaagttataatccagaatttaccagttagtagatgtttcgttctttgaaattttaaagttcaaatcagccatccctcccacaggtactctgtcacttcctgtagtaaaatgtagcaacttcttctgaagatcaagaggaaatccaagcacaacatcccaaaagtatctatagaaggaaatttacacaatgatacaatcctaattaattagtgatactaataaagtaagctctgagaaaccttctctaacacacaggtttgctaatagtataacattttataatattattcaactagtctaacaatgggtagcatagagctcggtttttgctctctatataatctaagtcttatttttcaacacagtgccagtaaaattctatttataaatttagcatatttgaaaaaaactctatactttgatagaaagttacataactttctcccaaggggattgctaaatgcattcatattttagtactcgcttatttttagaaatgaatgaagacagggtggactacagaatatttaacttcagtggttgaagagttctaagccacacaaacgagaagccactttggaatctgttctttggacacagcatctggagagtgaggagctcaccgtatagttgggtctgtttttgcatagccatcatactgagtactcctctgcagagcgtgcatatccagctcaggacttccacaaaccagaatttcaacctcttccggacgaagcagctgtcaataatcataaaagccataattaaaaatgatggtcttaaatgaaatttgaactattttaattgaagaatcaaatcatagaaatcatgacagtttttagtaaatcaaatgatttttgatgaagaaaatgcttttcacttacgttttcctactgtagcaagttattttgttttacggtttatatcttacaaaatggtaattagcagtttgtagaaaaccaagaacagaacccagcatgaagcaaactcattcttctccaccctcagcagagagcaccggcgtgtacaagctggctgccctgccaactcaatggcacttgtgcactgcagagcctgcattagtcggccttgtgccactcactagctttccaccttttaggtgagcttgttctcacttagaggttagatctgagaaaccgagaatactgtgccatttaatttttattttccttttctccctcctcccactcccagagagtcataaaacttagtcataactcaacagtacttttcaaaggtacttccagcaaacatgttacagaggttactctaaaacagtggttctcagcctttctaatgctgcgacccttaatatagttcttcatgttgtggtgaccctcaattataaaattattttcgttgctactctataactgtcattttgctcttgttatgacatgcaaacatctgatatgcaggataactgacatgtggcccctgtgaaaggatccctggacgtcaacggctttgcaatccacagtttgagagccactgccctaaaacaagctgtggagtgctaagctacttgctcctgctccctaagtaagcttgatagtccacttctttcttcttttaaaaacaactcaaatggaagactactccaatctctcatgataaaacagaagggacatagtcgaggcagggtggcatgggcctggatatatgaggtgaagaaatcatatgatagtcagaatatggcattctaactctagttagcaccatgagtccaccgtgcttctggagatgaactacagaccccaggttattggaacatgcacctcactcagtgagacgggtttttccttggactcccattctgggctctgttcctgagtcttaacatccacttacagctttttttttttttttttttttttttttttttttttttttttttttgagacagggtttctctgtgtagctttggagcctatcctggcactcgcttatctggagaccaggctggcctcaaacttacaaagattcgcctgcctctgcctcccgagtgctgggattaaaggcgtgcgccaccaacgcctggccacttacagctttttaagtcctaatttaagatacagcaaaaggaagaaagatctgaagtcacagttttctctctagaggagaaaggctgaaacagaagcactactgttatttcaaactatttttctacttttaaaagctcatctaccaaggtacttaaggagttatctgttataccattacaaaacctaattgaaagctcaacaatttaaactcaccattagggcatttgaagcacacacactatgaaatccacagtaaaatgcagcaaattgcttatagatggatttgttcaaaaggaagtctgtatagagctgtacatattctggaaagcaatttcacatctgttacatagtcatagtaaatgaaaagtactaattcactgcaattaaaagcggcatctaacttacctcttctattctgattggtaactggaatcttatcaccccctggctttaagttataggacttaattattccaaattcttcttgaaaaacctgatgggcgataccacgatatgtttattggtactgttgatgaacactgggcttcagtgagtagatttgtagaacagttctgtccctccctttaaacacaaaactgccaaaagcctaaactttttgtgacatatatatatgaatgaagaggtgtcattctgaggttaaaaaaaaaaaagcaggttcctgttaaatacaattaaattctttaatgaagcccacaaaacttgtatggcaagtaagagaggtagaaaggactgttttggtctgactcattagcttctcctaaacttcctgtgtaggggtgatgcagcaggccagctttggtaaaaagcaaacgggtcacaggaatatgcaacagcttagcagagtgccacgcccttgatggattcatttccgcatgctcatctgcatgcctctgctccactgtttctattactagatttgacccttctcagacgaactgagacagggtctttctgtgtagctcaggctgtccacaaaaacccagtttttcctgagcaccaggcccccccgctgcactgctatatgacacttaaggtccttgtcttagatcctatgtgttgattggtgcttgttcatccaatcgaaagtgtttagtaacaagtggcattttcatattatgacatacagctgacaaacagtgtatgctctcttcagtacctggaatgttgaatagaaatcttcttcaacattgccttcatatgataagagttcctttaatccatgggccaattcctgtaagaaaatgtgtgatctgtcaactagcattccttcagattgtaaggaaacagactgtgagacccttacccgtgagactacagagtaaactcatattttaagacaaataattgagatatgatacttgttaatgatttctaccatccacggcttagaaaaattgaagttcatgcaggaggaaattgtttagttcaactagagatctaaccctatggctcattcttaagcaagcaggtgttgagctctactgtgatttccagtgtaattcctggctctctgccacattactgtttgtgaatttttggtgcttttcacttatatatattcctaaaagtgtgctactattttaggatgcattgtttaaacattagacatgcacttcgcatatgttaagggcttatacattttaggtatcatgtgctcctctcccaagaaaagcctgagagtgctggaagaaatattttctgacaacttcaattacttatgaacaagaacttaaaagcagaactggctcaatatttaagttttcaagcttcatggaaaattacttttaatttatattaaattatttgaaaagataagtaatgtcataggttgcaataatcttatataccttacataataaatttctattccattaaaagcacaggactgagggccttagatctggcaggacagtggtgattttgtcatgactactggattatgtgtattgcccatgaccaccaactgtaagaaagacacattgcagtggtagcatccacaaagagactgtgaatctccatcagaaatgatggaagagcaggcccagatcctgactgacaaaacaatggctgcatttcaacaaggaatgatacctctagctctacccttggctcctcctcctgcaggggaaatgatcctaattcttcccagtctcctgagtcctcctcatctggaatgatgtccacaccccacattagaggtctttccatggtgccaccaataggcccttctcttgggatgatgtctataggacctgctcttggaatgaggccacccatgggaggccatatgcccatgattcccaaatctccaatgctgagactgcctgcttgccccaggatggtgcctactcatcctggcatgacttgactggacaggtaacagcagacaggcttgttatcagttctctgttacttgttctgttttgccagaagatcatagtgctgcatctgagtgttttctagaggcactacaagggggacttctccccattcctagcaaagagaatagtcttggatgggagaagtgggactaaaaaaagtagttttcacttgtactgtgaaatgtgaaaataaaattgttgagttaaaaatttgttttttgaaaacacgtatttttatacaaatctaggctggtagagacttgatatgcctatcaccattaaaatatttattttaaattatgtgtatttgtgtaagtcctgtataagtaagtgcacatgtgtgctggggtctgcagaagccatgtgttagatccctcagagctggtcttacaggcagttgtcaacaccctgatatgggcaccggaatgaacctgcaagagtagtaagtgctcttaactggtaagacatccagcccatcacttgtttttaattattaataaaaaatcctattattcccataagggcactagtgctcagagaagttacattctcactcaaattcacaaagccagtaaatggcatggtctgtattcaaatcaatgacatcagacttaaacaactattctgtaagagcttaagtacattgcacaataggtgactatctctataagcaagatggaaaagaggtctaaaaggaaagccctgttttaaagaacagcatcagaagactgtacaaagaggcattcatcattacatgagtacgtgatgttaataacatacttacaggcataatctgacacaagtcatcaatggtaacgccacagatgcctactggtgtattttgatcactaggtacgatgggagggctcagtaatttcttgtaacagcagggaggaaaacgaatatccaaggtgatgctgttataaacagctagtcccatgagctatgcatactaaatgttaagtattaacataaaatccttgacaacaaatgagttttgagttatgcatcagtctacttcttacatatttccttcagacctaacgctgactttttaattagtccaacacacctttctttctttaattttcctttatttacatactataattcttgattaacaaaaaacacagaaataagttcatttaataggatttaatgactttaggcattcctataaattatttagtatataaaaatgctaaatttaagcaagcacgttggtggttttataagcagcactaagagttttattcactgcagaatacagcactgatttttagaaactgccatgtttagttatttaaagcttaaacaaggctgtgttaaaggatctggaatgaataaacatatggatgtataaacactgttaatgagataatagtatgagtagactcattctaagtcaccatgtaggctagtatgtagaaggagaacatattgaacatatgttcaaatatacttacataatcaggatagtagcaatgataataatcataatacaagactattataatttataattctctactatgacaataacttcaaaacattttcatttaaaaatctaggtgttagattcctaaaacctaaggaagtaggttaataggctttgctacagagccttctcacaaacagaagtactttacttcatactaaatcaaccttttctgattgaaagagggatgggataatttttctgttggtgtcactggagtgctctgtgctgtgaacaccctgaaaacgtgcactgtactatactgtctctactctcagttcctatatcctttttggtataggcaattctacttttaaaatgtcactgtattaatgctcttgatataatctttacaatattttaccattattactttgtgttttattgctctatttcttataaacacattaccatatttacagaccttactacacttaaaaataactgtaatcaaatactaaataattgtgtgacacgtttattttagacacatttgctcaacatgaaatatacacataagaacatgtttactatgatcttttgggtagtgactgagtaaaacctaccaacattgtgaaagaagatgactgcagttcacaatgttatgaatagcaccatttcataagtgtaatagctgactttattgaaaatattaggaagtcaaaatataactctgagctatgacataagtattgcatggcatgataaccacatgcattaagaaattctaataggtcaagttagtcaaaggtaccagagaagtggaaaacactccagtgagaattgtaagtgacagaaaacaggaatccatgcattgttcagcatccttggatattgtggaatcttttgctttggaccttagacaatctacaaaacacttcaaattaacttgccgatttcaatgtatagtattgcttcctgatactttttgtttcatttattctttcaactttcatatacatcctcaggatttaatcacaattaacgcaaaacaggccttaagtgggtggatgctcagtatttcccaaaagtcccagtgtagttgctgctttgtagtcagtccgtaacaactcagtcttctattatcctccttatcctctcagcttaagttcctaccttttccgggaagaacataataccacatcttttccaccttagaattccaccacacctatttttatgctaatcttgatttttaatgaagtcacaaaccccttagtacttattagtgccatgctgcatggtcttctgactgagaataaatgaccccgcattgatggtcatatgtttgtttagatgctaaacttctcaaagttggaattttctctcttttaacccacacatcttcagcactagatcatctatttcctcttcctttattttccacatttacatttcttggaatttgaaaagctaatgtacaaggcatcatgtctaatatctctataaatctatcaatgtaggaataaattacacaacatacctgaaatagagattgaggatggtaaattgatgcataagattaaaaggctgtaaaataattatgtatgttttaaatactgcccattgcatttacttttcattttttagggttacctccttaatgtctcaggaactcagggtacattaaaaaaaaaactagatttaattcttgcaatttcaatttagtaagctgaacaaactgagcacacacacacacacaaacccaagaacagaaaataatttattacaaatggaaaatactgcagattttaaaaaatgttttatatttttgataattttgatattttagtaatcattttgagatgagagaaaaattttaaattcagccattttctttaatgtattaagactatggttatggagatatgatattacatattagacagattagagaaaatctaattagtaaatttgataatgttcaattttctaaaataacatttttctaaaatacagattgaaaaaaaaaatccttaaaaaaaaatcccttagtctagtagcacctcctagtggaaagtttaaaggatacaattccaaccaatcggaattcagaatagttatcacatttaaagctgctaaaccaatggcagttcgaatccttgtggtatgtaaacatgcctgcaaagaggaaacacaatttgtccacaagacaaaaagagatggtaaaatacatatgatagctaccaaaagtaaatcattgtagcaatagttctgttacaaaccatctttcatgctaaaaatttcacagaatacatttgcaaatcttagtaaaatatatatggaaggcatttgattttctttgatattttgagttgaggataaaaggcataactaatcagataacttcataaaactatagttttatagcttatgagcaaaataaaatttgagcattatctatatagacacttcaatatctatctttgccaaccctgtctcttattaccagaaagattttacctgtgtacccatgatatctataatatgtatgatatgtgtaccctataaaatatagaaattctcctttgaaggaaaacattcaatagacactaataattatgtagtacttcttctatataaaataaaatttgaagaccttaaaacaatgaacttgtggattactatttccttttgactgtctggtgctatctacatgtgtgcatacatgtttgtatgtgtgtacctgtgtgctcacatgttcatatgtgtgtggataccacagtttaatgtcaggggtcttcctcaggcacattctaccttatttttgaaacagagtctcccactgattctggagtccacctgttaggctagactagttgtctagcaagctgtagggacctacccatccgtctcctcagtgctgggactacagaggagtgatgcacggcagccccttgcttctcacatggatggggggatctaagccgagaccctctggctcacacaaccagcactttactgactaaccatctccatggaacacagacttgtttcttaaaacaactattcactatttaatgaaagcagcgtcacaaactagtgtagaagaaaacaatacacttgtttttaaataccgaatgttctttatttcaatggcacacttttatgcatttggtttattcaagagatgtatggttatctctgtacaaattctttatttacagctcatgaaaatgtcagggctgctactggagaaacactgttcacaaacattacagactcaccataatctggatggaaaatctgtcgaattagaagaaggaaccattctttggtcaagccacccatatccaaaccagcttcacctacaaatgtaactttcaacttcttcttcaagtctgctcttttccgggttaactatttgaagaagttatgtagtaagggagaataaaggacaatgaaaaggtaattcatttattttttttaatgttaggcaaactttagttatttttacttccataaacattcatccatccatccaagttgccagacatgataagctaggtgttatatatttgttttatagattagaaaaaagaattagaggtcagatgccttaaagaaggttacagtccccaagaattagaatgcatccaaaattttaatttagtagatgacaatacaaagtaactttttacatcccctttctttttcaacactatattaagaaaatgacatggatataatagccattatctcatcttaactacatgatggtctgattgcagcatgtatatacaggaagccttgcaatatacatacatgggtcaatgtttgcaagaatctaaataggcccgatatacccacaggtcagacctatagatttatagatgagcaatctgaggtctggagaatttaaaatgggaaagagagatgggtgggtctagaatccaggtagctactaagaaacatgaattatgcatttaagtagcctatatcaatgcttctaaggaattaatcaactattaataaacattaaaatgaaatatagcttacttatataaaatttatattaactatatcagaatttttagaagcatatatattggcaaatagaaataataatttaataaaattttagtaataagtcacatagttgaatttattttaatcaatgccattttggaataaattatacctcatcaagtgagtcgctaaccagatgtgtccgccttactttcatatttaggaataacatattcatgtcaggtctttgtcttcgagatactttatccaccagactttgctaattaaataagaaagcaaacattttcacttttacttaaactataatttcacttaaaacatttaaaacatattaataaaaatagcttaattcttgtttatgctatctttcataaataatttcataaaccaattacatatattttagcttgtgaaacattactactttattttgaaacaataatagccagtgggtaccaaaatcttgctcaacttttatagtgaggaaggtgcacttgactttctacaggtctaaagttttctgtgtaatagaaggaggacatttagccaggtggtggtgtctttaattccagaactcagggaggcagaggcaggcagatctctgtaggtttgagccagtcttgtctataaagtgagttccaggacagccaaagctacacaaagaaaccctgtatcaaaaaaccccaattcaggtatttctaatgatgaactcaggcttaatctattttagatagcgaatttatttgaaaagaatagtctacttctagaaagtaaagaattaatgtatctaagacgtcagagactttaacaatgctcagaccttttactcgattagatagttccactttggggagttttaaagattagaaaaatactttagcagtggatctctgcatctacttccatcggttactggataaaggttctatgatggcaattaaggtagtcatcaatctgattaactcctggagtccagttgtagagaaggaggaacaataatttgagcaaaggggtcaagaccatgatggggacaccctcagaatcagctgacttgggcaactgggagctcacagaccccagtctgacagctggggaacctgtacaggatcgaactagacccccctgaatgtggaagacagttgtggggcttgggcaatttatgggcccataagcagtggtacctgtatttatccctagtgcacgaactggcttcttggagcccattccctatgctgggataccttgctcagcctagatacgggggtggtggggggaaccttggtcctgcctcaaatgatgtggcagactttgatgtttccccatgggaggtcttaccctctctggggggtggatggagggtggggtggaagaaggtagggagagtaggaggagggaactgggattggtatgtaaaaaaattaaaaagaaaaatattttatttcaaaagatactcataaaaatactaaccatacaagcaaagctttagaattattctaagtagatctagttaatggcatataatgcagctactaaaaatgagtaggaaaactatgtaaacagttcaaacaaggatcaaaatgatgtatataacaatgccttatctctgttgactttaaagactaccaaaagaaaatttaccaaaatgttaacaatagacatactgggtgatacagatatgaaagatttgaaaaatgaatttttcatatttcttcaaaatataagcactgagtatataaaaaccaacatatcaaaatgtataagaaatatataaatgtcatttattatacaaaatcaaaatgcttgtatagttacttatttagataatgattactgaactattttactgtctttggtgacaatgaggatgaattctgtgcagataaggatgaatatttcagacatttgaagtatagtaattgcaggtcccaaatctatagaatttgagacttcctccaggcctccaatctccagtgttaaactcagtagttttttgcttttctgggcctgtattatcaaggaagtctgtgttcctggacagtgtctatgtaacagatcttttgtctttcccttctcttcctatcttctcttcctgtctttgcccctaagtagctatctcatgtcaacatttaccctgatgctaatggagacaagcttagcagttctttccactggaaatgtatatttgccataaaaacgctccaagtgaaagaggtcaaggaaggtagaatttttagcaatcttacagaacttatttatttttgcaattgcagactatagcataagctgtgtcaaaagagtcaccagtcattaattcaagtggcatgacaggaacaacctgtgagagctaacaatgcctcttgattctttactctctactcccttcccaccatgttctatgaaaacgtgtctgctgttgtcctttccagtagaaggaatgcagcacagaaagaaagacatctgatcccttaagcgtgactggcagggaattgctagagaaatctggatgaactagccatatctattttacttaaactataacaaatcacatagccaaagtgggaaaaataaaagacaagtgacacagaaataatgcaattaagccaaaatgttcagatgactagccatacagattaacccttgagccagtatctggtattgaatacatccaattaaactcagtcttcaggggcagcatggctttggaattctctttggagccataggcaatacaatttcttctaatgttctcatactcaatgcaagctgatttttggagcttatcaggcactaaaacctttgtccttgtctgtaacagaaaaaatatcttggaactaaactgctgaataaactattcttatttttaaattttgaatatcataatttatactttgtttttatgttcttgaacaagacatggaaataatttctgtttactatgtttctttctactttaagaagatacagccaagcttctctttcattttaaaaagtgtatataatcttgttacacagtaggagcctgagatacacaagtgtgtacatgagcagtctggctcttacttcctgtgctatactgaacacactggtaggcagtactgaggcccaggggtaaacttcattttgctctacaattttccaaaagtctgtcctactttctgtgggtttcccatgcactgagaaacaattaaaatatttcactttccttgagcatatttcttagtcctataagatatatacttagcgttatatcatctaatgtcttggttgtttctgatttttgtgaactccagagaatgccataaagtgcttgatttgtgttagttaaggcccttctggtctcaccatggttttcagtgatacttctctagctacctggaatagtaggtctatacaaaatgatttccaacaaactcctcaattttgggtctatcagaaatatttctgctacatttattttagtcagaagctgactagatgaggggtgttccatctcccatattgtgaatagttactttgtggaggtaataacataaataatattttcaacaatttctgattacactaaaacaattacaagacatttaacttatttattatttactatattgattatagtcagcataaatagctttcatagctggcttacccttgcgatgcttatcatctgttgttctgagtctctctgaataatgattttttttgcagctatagaaataacgaatgggtactgacagaaggaaaacctgctcaacaagcgaaaacagaaaaagcaaaatggtgcatttttagcaaaattacactaagggaatctaaggaatccttgcaatataaaacattccttttgtatggtgttttaccatttacaaaagattttatgtgcatgattttatatccacaaacctatgaaaaatgtatcatttctagaagtgcagtgccataattctctataggaagccatagctaactttctaaatatgtgctagtcacttaaattattcacacaaataatttccattttcatagtcacctatattatcatctgtgaaaaacatggctaacagcaggatcaggaggcaaaaatgttgatggtggagaaatagaacagaatattacatgttcaaatgaatatgcaatttaatattcaataatatgcaatatttctgatgtgtgaacatcagaaatgaagaaatatagcaattatagtatacaaaaacagtcaaatgtaagagcaatataataaaaaattagaaaaatgttagtagtactatatctaatggtataaaaatatgaaatgcatccacttataaagatatgacattgttatcaaagggtatggaaataacctggttctcagatcagagttaagtcttacactatatatgaaagccacaaactacacagacataaatgcatgtggaaagaatgagtagcagtgacactttgggactcccaacagaggggactgaagtgtgggcggagggggcggggtaagagctcagtgacagaagtaactgcaatgaatccatcaattttggttgtgtctcatctgaacatatctgtgctggtatatctgtggccattgatgcaaagaagacatgagaaagaagagacagcccaatgtgctgagcatgagacagcttcgactctgattccaaaccgataaaaaaatacaacttgctagtactagtaataacaataataacggtaataactgaatgactaaagctaactaaaagtctggaaataaaaagaaaaagcaatgaactttaaaaggatatatgttggttcattatatactttaaaacagtgcttctcaacctttgtcattttggtacacacacataaaaaaatactatgtgcatgaagtatccagataaacatccctctgtcagtagtgactttccctgaggttcagatcccattctaggtcccagctgactgccaatggcagatgggatcaactggaacacctgtggggcacactgttggtatgcgccctgtaactggaaggagcgctgtattcaaagttgtcaaggaaacagtgcaactcttcattgttttatggccataattacattaaaatatgaaggaaagcatctttgtaaaagaaattctaccaagaaaatattccccagactgactatagtcttcagaaaaaattgtttttcagttttgcttgttcatgtgtgcactgagatttaatcagagggccattataaattttaggtcaattctggtagagttcctggaaggcttaaccaatccatgggtttatctaggctctcttggctatttatatttataattacatctcttcatctacttaaaaaaagaaatctcctggatattgcacgtttggagaagaaattatgtttgggataggactgataatttaatccaaatgtggataaaaaatatagagtattcaagaattttgccaagcattttgaaaatctgttgcattaaataaattgtgaagctcctttctctgaaatatctattctttcgtaattcacaatcactatttgtgtgcagactaagggagaaggagtgaatgtgtattgagtggtcccatgagtgtgacaatgaattagattaagccctggtacactatggtctccaagacagttttgtaaagtaatatcaaacattcacagccattcatttacatattgtctagagctaaaatagaaatatgtaaggtttgcagaactgaaaatatttatcttctagccctttagagaaaaaaaaatatgcaagttgccccttggggtagatgacagcacacagaatactaagctccgagaaactgcatatctacaaagaaccttgctgttcttgaaaaggtggattaactaaaacaaaactatattaccatgtatataaactcaagatgtagtgaaagtaaaaccttctgatagacacaatgacatttaaagccatgtatctaaacgtttctatgtacaggatttatattacttataatataaacttaaaatccagtttttattttagatagcattttgttaggtagatgagctgttgatcctacctgtgagaatttccaaagctctgccaagtatgatactcttccatgagatcaatgtgatccaaggtagaattatagaaatcagtgtaaggaataagggggggatgaatcaaattgttggcagtatctgtgaagataaattctcatatagcactcttttccaatatgtatgtgattcattctaataataaacacactatttagtatctattggctagctctaacttaactttctgttttaattaactgcatttctaatgagaaagggcatttttaacactggtcaaaatacagctattccttacttaaaaaaaaaaaaaccgcttctgatgaggatcataaaaatatttagagaagggtgcagatgctcatgtactcattatttccccaccagtgttgtctcttgcaggattcctcaggaattagtgggagttcatgtttcctcaggaattgttacttagtgggtcatatgttcttaagaccataatataaaacattgcagaaagaaaagctttttccagttttgttaaaaaattgtaaaataaaaattacatactgcaaaattcataaacaaaacagaaaatgaattttttcttcaaaataatggtttaaaagttaaagctgcccttctagtactcagagaccctgaaggtatgcctctgctgcttctcaggagacgagagtgagagaacagtggaacctactgagtaaagccaacactttggaagctgatgggatccaccaggaacactttgtcagaggtgggaattcttcaggctttgccggaaacaggcgtaaagaaacaaactgcagcaacctctctaccagctgcttgaatttcttctgggataatctggtaaagatttagaaataattccagtcaaaattttcatgtctcattttgtcaaaatatttgttagagatcaaactacatcctatacacacagaatatagactattcattccctcaaattatatttattaagttgacaacatttcaaaagataccatgagtactatttctcaagtaagaaataaacactgaaattactgtagtgtcatttatataattttaaggctttcagcgttcagtcagtttcattattcacagatcctatccttgaagactaacttgtatgctaacacttattccttactccacaggtcagcacttgtgctttcatggctgtttgtggacataacaatggtgagaatgatgacttgtctggcaggcccaaatgagggccagcaaggcagtgctttaacacttgtgtcagttctcagactggaacctggtgtcctttctatagtctaataacatgtttttcatatttttgtactttttttgatgtttctgttatttcaaaacatggccctccaggcaggcatggcagtgtgcacctgtaatccctataaattggaggctaagacaagatgactgtgagttggaggtcctttgggatccatggtaagctctaggccagcttgaggtacagagtgagagcctgtctcaaaaaccaaaaccaaaacccaactcctataatgtaacaattaagtgctggctagttctgatgaacaaggatgtgatgctatacaatgaacaagaaggatgtggggtgttgtataaagaaaatgtgtgtgttacagctgtactggcatggcttatagtgcaatcgtcatgatctcaattttactaatcgtcttacgttggatgaagtcaaatattaacactcacaaagtggatgcttagtgagcagacaggactgtatcagaggctcctagtaaaccaccgctgagcaaaggcttagcgatgtctgctatctcatcactgacagtgactttgaagacacaactagtgtgaataatgaaaactgacagcatttaagttttaatttggaaatattttgcccttttagtttctatccatcacagagaaaggtttgttaatataaatatagttttaaggggaagaagtaatgtgcttttgcaatctggtatttttaataaggcaaagagacagtatcacatatatagtaagatgtgttaataaataagagaggaaataaaaagatacacagtaaacaatggctgagcaaatccagttgaagtgtataaaataaaaccagaaatatgctatataaaaatcacaagtggtagatattttcaacaattttcccaagaaacatgattacttagattaaaaataggtttttgtgtatcttttatgtattactgaagtatacattttataactggcttttgaagcatttcaaagtataaacatcattcctaaaaatcttcaaaatattcaaatatggtaaaggtttacagtaatttatcataaaaattaataatatcacatttaaatcagagagactatgacacatcttagtattgcagaatggtttactttttaagccagtgaactaggaaatgatggtcagcttccactagggtagctatctgtcgtagcaaatgagcatagatgacgtatgtagatgtgatattaaattgaggattctgaaaaagatattaaagataagtgtgttaaaattgtgctaacaaggaaaaccataaagcttaatgagttttaagtggcaaattcaggaagctacatttgagtttctgcagttctttaaaaacaagtgacttcttgataacaagaatggagataccataatagagggagacattttaggtttatagagaaatcaggcactagggaaaagtctggagatctacaaagatgacaccagctaacaatctaagcaacagaggagaggctaccttaaatgccctcccctgataatgagattgatgactgacttatttgccacctgatagccctcatccagcagctggtggaagtaaaaggaagatacccacagctaatcactgaactgaactggaatccagatgcagagaaggacaagtgaagagcaaaggggtccagaccaggctggtgaaacccacagaaacagctgacctgaacaagggggaactcatggaccccagaccgataactgagaaaccagcataggactgatccaggccccaggaacatgggtttcagtgaggaaaccttagaaatctacggaacctgctgtagtagttcagtacttatccctagcataggtgtggactttgggagtccattccacatagaggaatactccctgagccaagacacaggggggtgggcctaggccctatcccaaaggatatgatagactctgatgacaccccatggaaggcctcaccatccagggggagcagaaaggatatgtgataggtagggttttagttggggtggtggtggtaggggaggataggagggagaagggagggaactgggattgtcatgtaaaacaatcttgtttctaattcaaataaaaaaaatctgcacaaaaaagaaaagtaacctatttgttttaagagctttatatataattaagaactaattatctcaacaagttagaaaatacaaagagaactcatcatgactttggtatacaatgctctaattaaagaaaacattttgtaaaaaaaaaaaaacaacaacagaatctctatgtcctgcaaataaaaatcttatttcatacttgggtcattaaaaacaaaaacaacaacaacaacaacaacaaacaagtgacttctcgtttattgaagcaagactagtttttactgtagtataatccacaggctttgcacttagggcagatctgggtctgagggatgatcctaccacatattagctgtgtgccattaggcacaattttaaaactttaattttcaatttccacagctgtaagatggaaataatatctaccccaagagttgttttgagttttaaaaaagaaaacacatataaagcactgaggttcatgtttcataaatgctggcaatcactattatccaattaaataacaacaaaataatgtgggtttccttgatttaaaaaaaaggaaaacaaggtaaatgcttgtaaaacttttgcactgggaaatgaatcagctgtatatgttacaagaataagcatgtactctggccacttttcactgtcaaatgactgaaagaatactcacaactaagcaaaacccaatgcttatctttcaaaaggctaatgctctactacatttcagaaatgtctgtaagagtcactattattaaaatcaggtgctggctggggagatggcctggagatttagagtgcctgctgccttccaggggacctgagtttggtttcagagcccagaacagtgtgcaatgctagctccagggcatgtgactagccttcatggacactctacacatgtagaatgcgcacgcacccacccacccacccaccccacacacacacaaagtaaaaatacatctttaaaaattaacccaattgtgatgataaaaaagagagcactgtttttcaaactgactgacaggcaggagtgaaattagggcgctgaccacttactccagccacagctctgggaaagggggatgtgtgagcagagtttatagttgcctaacacactcttctaagatagctgagcttcatggtgacattttctctctctgcatgtttccttttttgcttctaattttgatgcttttctcatttgtttcctttatctttctccccttcctttcccgttttttgttttttcttttgtttccatgtttcttttattatgaatatcataatactgagctaaacagtgtaacttaatattttcacctttacatgagttaatatatatacctgaataatttggtaaattataaagaatgatgcaaatgtgttaaataagataatatagttttccaagataattcaaaattcaaatttgttttttttatatttttgaatctgcatctctctcatgaggaagcaagtatcattttgttttataacaaatgtaataactttatgtttctatcacaattctaatgaacattactgaaaaatatggacaagttagaaactaaggatatgggaaagttctgtagcctgtcccaatcaattagttcaaaggagagagtgtgagtggagagggaagtacatccattctgtttgttcccaacactgtggaaagtaggcaagaaactcacttatatctagttcctcacataatttagcttctgagtatttgttataatgttagcctttgggttgctagtaactattattctaaagagtatgaatatgattgccaaataatagtgattttcacatgcagactgacatatgaattcaataattcttacttacctgtaacagtataaaatatgctctaagatcatcttttgttcgtggcctgaaacaggaacatgcatgactgattacagataaatgtttaatttcatagtatctaacaaagacatgaccattacatatttgtaagaacggagaaaccaaaatgaatttaaatttacatgcattatttttattgagatagtaacatgtctctagtaagcagagaaaatattaggctggttctgagtactacttataacccaagttcctcaggaaagctatagcattttaaggtaaaagactaaatatggaaatgtttaaaagtataacaaataaccaacaatttaaaaatatattttgtttgacacagattatttttacttatctatgcattaaagaaagaaactgtatttatagtcaactcctggagtgacagaaatgtctaaaacctgcaacaagaagggtgatggtgggtccatgcctctcctgctcctccagatccaatcccccagtctcatcctgagctctgcagcagaaaaccgccctttcatttctgaccccattctcaatggatcacaatcttttctaacccttattccccaactcatccctgtatcctagcctctattaccagcaagcataccctaggaacacccagctgagcaggccagggaaacaggtccacagaaaatttcctaccaggcagcacacggctgccacactctcctaaagtccagagaagaaacagaaatcaaggaacaaaacatacacccaacaaagacagatccagaaatcagcacatagacctgttctcaacctgtgctatgtgacccctttgcggtcaaatgaccctttcacagtggtcgcataaaagatatgctgcatatcagatatttaattatgatttataacagtagcaaaagtacagttataaagtagcaatagaaatagtttcatggttgggggtcaccacagcacaagggactgtattaaagggtcacagcattaggacctaaaccattgacctaaatctataatcatcccaatcccagatgcctagaaacgaatgcaaaacactatcaataacagccagggcaatatgtctccaccagagctcagctatcctaccacagcagtccttgaattttccaacacagctgaagcagaagaaaaagatcctaaaattgtctgtacgaaggtgatacaattttttaaagaagaaattaataaatccctaaaagaaatccaggaaaatagagtgtgaggaaatagaagcaataaagaaaatccaaactgagggaattctggaagtgaaaaagtttaggaattcgagtagaaactacacaagcaatcctcaccaacagaatataagagatggaagaaagaatctcaggtgttgaagatacaatagaagaaatgaaagtatcagtcaaagaaaatgttaaaccaaaaaacaaacaaacaaacaaaacaaacaagaaaccctcctgacaggaaatttgaagaccaagcgtaagaataataggaataaaggaaggagaagaattccagctcaaaggttcagaaaatattttttaaacaaaatcctagaagaaaaatttcctaatctgaaagagaagatgtcctctcagcacataataatcacaacactaaaagtacagaacaaagaaaattacaatatgcaagggaaaaaagaccaagtaacatgtaaaggcagacctatcagaatcacacccaatttctcaatggatactcttaaagccagaaggtcctggacagatgtgctgcatattctaagaaaccacagatgccagcccagactattttacccagcaaaactctcaataaccatagatggagaaaataagacatcacatgacaaggtctaatttaagcaacatttacctaaaaatccctaatggtggtattttgtttatgatctaataaagcttgcctgaatttcagaacgcaaagctagccacagtcatagaggtcaggcagtggtggtacacacttttaatcccagcagccacactggttagccatagaagctgggcagtggtggtgcatgcctttaatcccagcactagagaggaatataagacaggagctcagggtctaagtgtgtattcagactacagtcatactgagaacaggatcaccctagccttggtagaagttaagaactcttgcttttctgatcttcagcttgaactccaatatctgtctctgggtttttattattcatgccacaaatcctgttctacagagggttccagaaggaaaattccaacctgaggaggttaactacaaccatgaaaatatagggataaaataatcccacacaaccaaaatcaaaggaaggaaaacacacacacacacacacacacacacacacacacacacacacacacacacacacacacagagccaccaataataacaacaaaataataggaatcaacaatcattggtcacatccaagaaacatacctcaacatcaaagatagccattacttcagataaagggttgaaaaagatattccaagcaaatgaacctaagaaacaaaagctggtgtagccattttaatgtttaacaaaagaaatttcacaccaaaaataattagtagaggcagggaaggacattacatagtcatcaaaacaaaaattgactaagatattttaattcttaacatctatgcctcaaacacaaggacacatacgtttacaaaacaaaacaaaacacaaaaaaacaaaccatagcttaaatcacgtattgacttacacactgagagtgggagacttcaatacgctattctgaccaatagacaggttgtatagacaaaaactaaacagagaaatgctacagctaacaaatgctataagccaaagagatataacattatttacagaacatttcacccaaacacaaaagaatataaaattgtctctgaatctcacagaactttttccaaaattgaccatatactcagacacaaagcaagtctcaacagatacaagaaaattgaaattactccctgcatcctatcaggccaccacaaaataaagctggatttcaacaacagaagcaacagaaagcttacaaactcatggaaactgaacaaaaaattggtaaagacagaaataaaaaaattaaagactttctggaattggatgaaaatgaatacacatcataccaaatgtaaggaaaacaatgaaagtccatagcactaagtgcctacataaaaaataaaaacaaacaaaaactggtgatatctcataccagcaacttaacagcacactagaaagctctagaacaaaaagcagaaatcagacccaaaagaagtagatggcaagaagcaatcaaactcagggctgaaatcaataaagtagaaacaaagagaacaatacaaagaatcaatgaaatgaagagttggtcttttgagataatcagtaagactgacaaacccttatccaaattaactaaaaggtttagagaaaagatccaaattaataggatcagaaatgaaagggggtacataacaacagacaccattgaaatccagagatcataaggatatgctttttaaaaaagacttgtactccatcaaattggaaaatttaaaagaaatggataattttgtcaataggaatcacttagagaggtcaaataaagatcagataaacaatttatccctttttgcttttataacctatatcccctagtgaaaaagaaacagtcattaaaagctttaaaaaaaaaaaaagctcagggctccatggttttataattctaccagactttccaagagttaacgccaataccctcaaattaccccacagaaacagaaggaacatttcccagttcattctataagactgcagtcaacctgataccaaaatctcacaaagacccaacaaagaaaaaaaaattacagaccaatttctcttatgaacacaggcgtaaaaatactcaataaaatacttgcaaatccaagaacacaccaaaaagatcatccacaatgatcaagtaggcttcatcccagagatgaagggatggttaaacatatgaaaatctgtcattgtaatccaccatataaacaaacaagacaaaagcacatgatcacctcattagattctgagaaagcctctaacaaaatccaacactactttcatgataaaagtcatggcgagatcagggatatgagggacatacctaaacacaataaaggcaattaacatcaagccattattggacagtgacttatatggagagaaactctaagcgattccactaaaatcagcaataaaacaaggttgcccactctttccatacttacaattcttgatgtcttatctagaataagacaactgaaggagatcagggggataaacattggaaagaaagaagtcaaactatctttatttgtaggtgctactccaaatggaacaaagacctcagcataaaatcaggtacactgaacttaaacagagtagaaagtggggaatagccttgaactcactggcacaagagaagacttcttgaacaaaacactgatggcacaggcattaagatcaacaataaatgaatatgaaactgaaaaggttctataagacaaaggacactgtctttgagatacagtggtagtctacagaatgggaaaagatttttactaactcaactttcaatagagggttaatatccaaagttcagaaagaattcaagaaaactgatataaaaacaactagctcaaaaaatggggtatagatttatcattagagggaactcaaagtggctgagaaatacttaaagaaatgttcaatatccttagccattaggaaaatgcaaatcaaaacttgtttgagatttcatcttacacctgtcaaaattggtcaaaggactgggtctctgattcttgtgctttctctttggttctttgtttttctattggtttgaccacacccccacataccacacccccacataacacacccccagcactcaggcagcagcatcctccccacccacccacaccatcccctgccccatcagtgtccacctgagcaacttgccccacctacacctggaggaagagtgaccaccagagccacaggctccaactgcacccactggaggaaaagatgtgtagccagcagagtaacaatacattcaacaacattaagagcaatagggcaacaccagaaactagtggttctacaacagcaagacctgaacattgcaatgcagatgaagcagaagaaaacaaccttaaaaataactttatgaagaaggtagaggcccttaaagaggaaataaaaattctcttaaagaaatagagaaaaagacaaacagaaaattggacgaaatcaataaattcctgaaagaaaaccaagaaaaaaaagcagtaaaacaagtgaaggaaacattttaggacttgaaaaatgaaattgaggcaataaagaaaaagcaaaccgaggagaattctagaaatgggaaatcttggtaacctaacaggcctacagatgcaagcataatcaacggaatgcaagagatggaagagagaatctcagggctgaagatacaatagaggaaatagatccattggtcaaagaaaatgttaaatgcaacaaattcttaatacaaaagtccagaaaatctgggacaccatgaaaagaccaaacctatgaataatagggatataaggagaagaattccagctcaaaggcacagaaaatgtatttaataaaaatcatagaagaaaacttttccaacctaaagaaggatatgcctatggaggtacaaaaagcttacagaattggattatttggtgttttggtgattaacttcttgagttctttgtatattttggaaatcagccctctgtcagatgtggggttggtgaagatcttttcccattctgtgggctgtcatttttgtcttgttgactgtgtcctttgccttacagaagcttctcagtttcagaaggtcccatttattaattgtcaacttcagtgtctgtgctactagagttatgttcatgaagtgatctgtaccaatttgttcaagggtacctcccactttcttttctaagaggttcagtgtgtctggatttatgttgaagtctttgatccatttggacttaagttttgtgcatggtgatagataaggatctatctggaatcttctacatgtcagcatccagttatgccagcaccatttggtaaagatgctttcttttctccattgtataagtttagcttctttgtcaaaattcaggtgttcataggtgagtggattaatatcagggttttcaatttgattcactggtctacctgtctgtttttgtgccaattccaagctgttttcattactatagctctatagtacagcttgaagtcagggatggtgatgcctctggatgttcatttattgtacatggttgttttggctatccagagttttttgttttgccatataaaattgagtattgctctttcaaggtgtgtgaagacacttaagaaattgctcaacatccttagccatcagggaaatacaatggtacacctgccagaatggctaagatcaaaagcaccaatgacagtttatgctggagaggatatggaaggggaaagggacaagagctcctgagcaaactgggagctcagagagggggtggggaatgggggagggaggagaaaaaggaggggagaagaggagtgaggaggaagattgagtccagggaagaatagaggagagaaaaaaaaagagagagagagagataccttaatagagggagccattataggtttaaaaagtaatctggcactagggaaatgtccagagatccacaaggatgacccctaactaaaatctaagcaatagtgcagaggctaccttaaatgcccttcccctataatgagaatggtgactaccttaaatgccatcctagagccttccagtagctgatggaagcagcagacacccacagctaagcactgagcctaactcctggaatccagttgcagagagggaggagggatgagcaaaggggtcaacaccatgctggagaaacccacagaaacagctgacctgagcaagtgagagcacaaggaccccagtcgaaagctagggaaccatcattggactgaaccaagccctctgaatgggggtgtcagttaggacgcctgagcagcctatgggacctttgacagtggaaccaatatttattcctagtgcacaaatggactttgggagcctattccccatggagggacactctctcagcccagatacacaggcctaggccctcccccaatgatgtcacagactttgatgatcccccatggatggcctcaccctccctggggagtggatgggggtgggatggggggctatggggggtaatgggaggatgggagggagaaggaactgggattgatatgtaaaataagattgtttctaaatttaaaaaaaagaagcttacagaaaactgaatagactggacaaaaaaaagtcccctcaacctatatataaagaatattaagaactgtaaaaaggccaagtaacatataaaggtagacctaacagaattgcacccgacttctcaatgaaaactctgaaagccagaaggtcctggatagatgttctgcagacagtaagagactacggatgccagcccaaactactatacccagcaaagctttcaatcaccacagcaaacaagaaatttcatgacaaaacaagatttaaacaatacctatctataaatctagacttaaatgccaacccaaggaagttagctgcacccatgaaaacatagccaatagataacctcacaacagtaacccccccaaaagggaaatacataaatactaccaccactaccaccaaaaacaaaataacaggaattaacaatcactggccattaatatctcttattatcaatggactcaattcacctctaaaaagacacaggctaacagaatgggtatgaaaacaggactcatccttctgctgcacacaggaaatacacctcaacctcacagacagacagagtaaagggttggaaaaagattttccaatcaaatgaacctaagaaacaagctggtgtaacatctaacaaaatacacttcaaaagagatgagaaggatgttacatattcattacaggaaaaattcttcaagatgaagtttcaattctgaacatctgtgtttcaaaatacaagggcacccacctttgtaaaagaaacattactatcagtcctcatacactaacagtgggagacttcaacaccccactctcaccaatggacgtgtcagacagacagaaacttaacaagggaactaacagatgttatgactggaatgaacttaacatatttagagaacattccacccaaacacacaaaaaataccttctcagcacctctaaaattgaccacatacttggccaagaaaagttttttttaagattcattttaactgtatggatgtttttgctgcatgtgtacctcgtgtaagcctgttgtccagatgccagaagaggatgttgaatactctcttggaactgagagaaagtagtgtcatcccatgtggataatggtaactgaatctgggtcctgcaagagcagttaagtactcttaaccactcagccattttttccagcatcctgtgaaggggtcttagagaatgcctaaggatgctatatacagcagtgtcctggcacctgcctcactgccaatgtcaggactagagtgaagatacgagggaccactgctaattttggagggggcatgagcagcaggaaggccgagccacctacacgcggttcggtggctaattgaccaggtgagggagggaaggacatggtgtctgtcacgcactctacccatacctggtaacaaagcaaaccttaacagatacaaaaaaaattgtaataaccctctatatcttagcagattaccatgggcttaaagttagaagtcaacaacaacactaattgcagaaagcctacaaaactcatggaaattgaacaatgctcaactgaatcatcaatgggtcaatgaagaaataaagcaattaaatacttcctagaattcaacaaaaatgaaaacacaacatacctaaacttatgtgacactgtgaaaacagtgctacaaggaaagttcatagtgctaaatgcctacataaagaacacagagaaagctcacaccattgacttaacagcatacctgaaagctctagagcaaaaagaagcaaactcaccaaggaggagtagacaccaggaaataataaaattgagggctgaaatcaataaaatagaaacaaagagaacaatacaaagaatcaatgaaataaagaggtggttcttcaagaaaatgacaagatagacaaacccttacccaaactaaccaaaaggctagagagagaacatccaaactaataaaatcagaaatgaaaaggggggtataataacagacactgaggaaatccaaagaatcattagatcatactttgaaaacctatacaccacaaaattggaaaatgtaaaagaaatggacaattttcgggatagatatcacataccaaaattaaatcaagaccagataagcaatttaattagacctacaaaccctagtgaaatagaagcagaatcaaaagcctcccaaccaaaaaatgcctagggtaagatgttttcagctcagaattctacccgaattcaaagaagaactaactctaatactcctcaaattgttccacacaatagaaacagaaggaacattgccaaactctttttatgaggctacagttatcctgataagcaaactacatataaacacaactaagaaagataattgcataccaatctccctcatgaatattgacacaaaaatactcaataaaatatcgccaaactgaatccaagaacacttaaaaaaaatcatccaccattatcaagtaggcttcattccagagatgcagagatggttcaaacatacgaaaatcggtcaaggtaacccaccatataaataaactgaaagaaaaaaaaaacacacatgattatctcactaggtgctgaaaaagctttagacaaattccaacacccttcatgataaaggtcttggagagatcagtaatataaggaacatacctaaacataataaaggcaatatacagtaagtcaacagccaacatcaaactaaatggaaactaaagtgattccattaaaatcagtaaaaagacaaggctgtccactctctccatatctatttaatatagtactggaagttctagttagagcaataagacaacaaaaggagattgaggggacaaaaattggaaaggaagaagtcaaactttcactatttgcaggtgataggatagtatacataagtgaccccaaaaactaccagggaactactatagctgataaacaacttcagtaatgtggcaagatacaagattgactaaaaaaaaaaattagtagccatcctatatacagatgataaacagtctgagaaagaaatcagaaacatcaccctttacaatagccacaaataacataaaatatcttggggtaactttaactaaatgggtgaaagacctgtatgacaagaactttaagtctttaatgaaagaaactgaagaagataccacaaaatggaaagatctcccatggtcttggataagtaagataaacatagtaaaaatggcaactcaccaaaagcaatatatatattcaatgcaatccccatcaaaatcctaccctcaaaagaacaatactcaacttcatatggaaaaacaaaaaacccaggataaccaaaataatcctgtctaataaaggaacttccagaggcatcaccatccctgactttaagctctactatagagctatggtaataaaaacagcttggatcaatggaatcaaattggagactctggtatttattaatccacaaacatatgaacacctgatttttgacaaagaagccaaaattgtacactggaaaaaagaaagcatcttcaacaaatggtgctggtataactggatgtcaacatgtggaagaatgcaaatagatccatatctatccccatgcacaaaactcaagtccaaataaatcaaggacctcaacataaatccagttacactgaacctgatagaagagaaagtggtaagtcaccttgaatgcatgggcacaggaggccacttcttaaaaatgacagacactgagagcaacaattaataaatgggacctcctgaaattgagaagcttctgtaaagcaaagaacccagtcaacaagacaacatggcagcatacaaaatgggcaaagatcttcaccaacccaatatctgacagagggctgatatccaaaatatataaagaactcaagaaactagacattaaaataccaaataacccaattaaaaattggggtacagatctaaacagagaattctcaacagaagaaactgaaatggccaaaacacatttaaggaagtgctcaacatccttaagccatcatgaaaatgcaaatcaaaacaactctgagatatcatcttacacctgtcagaatggctaagatcaaaaacactgaggacagtttatgctggagaggatgtggagtaaggggaacattccactgctggtgggagtgcaaacttgtacagccactttggaaatcagtatggaggtttctcagaaaattgggaatcaatctacctcaagatccagccataccactcttgggcatatacccaaaggatgcatcagcataccacaaagacatttgctcaactatgttcatttattaatagccagcattatttgttaatagccagaacatagaaacaacctagatgcccctcaaccaaagaatggataaagaaaatgtggtacatctacaccatggagtattcctcagaggtaaaaacaaaaacaacaacaacaacaacaacaacaacaacaacaacaacaaaaaaccaatgacatgaaatttacaggcaaatggatggaactagaaaaaaaccatcctgagtgaggtaacccagagccagaaaaaacaaacatggtatgtactcactcacaagtggatattagacgtaaagcaaaggataaccaggctacaattcacaatcccagtcaagctaggtaaaaaagaagaccctaagagggacacacatggagggccctaggaaagggaaatagtaaagatctccagggtaaactgggaaggggagtagaagggtggggatgggagatgggaacacgaaagctcgagctggccaagatgggggagggctggagagggggagcaatgaaagagatatcttgatagagagagccattatagggttagggaaaaaccaggtgctagggcaatctcaaggaaaccacaaggatgcccccagctaagactcctagcaataatggaaagagtacctgaaccggcttgccctataatcagattagtgactaccctaattgttaccatagagcctacatccagtaactgatggaagcagatgcagtgatccacggacaagcattgggatgagctcctggagctatttgaagagaaggaagagggatcatataagcaagggtgatcgagatcacgatggggaaaaccacagagacagctgacctgacctagtggaagctcttggactctggactgacagctggggatcctgcatgggactgaactaagccctctgaatgtgggcaacagttatgtggctcaacctattgggagggccctggcagtgggaccagggacctatcctgggtacatgaatgggctttttggagcccattccctatggtgggataccttgctcaaccttgatttaggggttaggggcttggttctgcctcaacttggtatacctgactttgttgaatccccagtagaggccttactcctttggaggagtggattgggggtggtatagggaggagctggggagaggtgggggcaggagaaggcaagggaggggaactgaggctagtatgtaaaatgaaaaaatgttaaataaaaattttgttctgcaaaaaaaaaaaaaaaagaaaatctgatgagtgactggtgtatgctcacgatttgggtttttatctattgcttttgtctcaagtcttttccgttccgcttgaacttcatcaaactagaagtgtcatttatgtttacatgtattataaatgttgcacagacaacagaaagtatctatgggcttgccttcttatcatgtttctgatgatgtttttgttggcatgttcaggaaggagccaaggcccagtttggcctgaggtgcttatctgagatttctgctgagtaacaggggttttctttaaggctagtaacttattttctgagaaaatgttattgtctaccaaaaaagcccaagaaactgattaccacacatcctatatttgcacagcacatacacctgcacacaagatatttacatacatctgtgaaagattaattcactttcttatgcttactcactgataccaagaaatcacaaatctcagtaaattaaatagctttgtttcatgtattctatgatcttttctgatccatgtcaatgttaaagctcatctaagatacttcccaagagtaaaacatactcacatatattaagatacatatttaagtcatctatacagattaaatacaagttataattaccctttccattctcgtaacaggctgttaatgattcccttcaatactgacttttggatatcttgaggctggaggcaaaagaaaataataagatataataatggttaggatattttgtgatttttcacattaattttacttacagatgtatctgaatgatcataagcagacttaatgactgtagaacgttacccagagcagtatccatttcatacctgagaacttcagggagcactaataatgcagattattatgaggctgctctatgggatgagcagaacacaacctgcagaaatatatatgctgatcctttgatgactagcaacagctttatgtaactaaaaacaatttttctttccttgagaggacaaaatcatgaacataagtccaaaagtatcatgtttactaatttaaaatggttagcatatattttggatatgtacacataaattcaaatataccttgctttttgtgccaaaggtttcagtatgcaatccaggctggtcttgaacctttgatcttcctcagcttcttaagtgctggcattacaagtctgcacaattatacctggctatttgtgatcctaccaagttggcaagtgcaaccaagttatgttctattaaaattacatttttcttttgggattataatgtaattacatcatttcccctttccttactttaaaccctcctccatagccctattcactctctttcaaattcatggtttcttttttttattgttacatgtgtatatgtataacacacacacacacacacacacacacacacacacacacacacactgctcagtctgtataatgtttatgtgtacatatgttttcagggatgagctctgcaattgaataaccaaataaaatttctttttccttaatgccccaaacaaacaagcaaaaagtatagaccaatcactatcaacctatgggtcatgacccctttggaaaacctctatctctaaaaatatttacattatgattcataacagtagcaaattacagttatgaagtaacaatgaaaataattttatggttgagatcaccacaacatgaggaaatgtattaaagagttgtagcattaggaaggttgagaaccaatggtatagaccaatatctctcttaagcatagactgaaacacttaacaaattaacaaattgagacaaaaacatacaaaaagaattatacactacagccatgtaggatttttttgttttgttttgtttttcgagacagggtttctctgtgtagctttggagcctatcctggcactcgctctggagaccaggctggcctcgaactcacagagatctgtctacctttgcctcctgagtgctgggattaaaggcgtgtgccaccaacgcccggccagccatgtaggatttattgcaacttttcaaggctggtttgaccattgaaaataaaagtataaaattaattacatcaacaaaataaagaaaattcttaatttctactcaagatgtactgtctgagatgccattaataagcacttcttgtgactgattcagaactaaactttgagaaccatataagtaactttctttccctgagaaagtggagcatgagtttagaaagtctttctaaatacagattggatacagaagtattttctgtttcattctcagttaatcagaaaaagaatgacccaatattctgaaaattccaactctatttaccataaaattatatcagaatttctactgaaattgttacaaagtggctgcacttgacagaaaggagctgaagagatgactcagtggtcaagagcatttgctcctcttccagaggacctgagttcagtttccagcactcacactggaagctcacaacttcctgtaattccagtccagggtgctcttttggcttctgtgagcacccttacacacatagcatgcatccacacaaacatatacacaaattaaaaatcaaatctttttttaaaaagctaaaagagttgtgaaataaagaatagacatagaattatattacaggaatatgtccataaataaaacttacagtgttaagtaaggcatcgaatacagcattcaccaaatcagcattaaccccagagtcctcaattgtattaaatgaggcagtggcatctttctgtaaattcaattaaagaattaaacatgtttgatagttcatgaattatttttaataatatctgaaccatacttttttataatcccaactaatcttgtatgacgatccttgaaatgtaaatgagtacataaggaaggttttataatgttttttaaaatcgaaagaaatcaataatagtgaaataaataatatttactaaatcacaaataatattttgatatatgtggtagtttgaatgtatttggcccccataaactacatagggcatggcacattaggagatgtggtcttgttggagaaggctggatgacacacacctttaatccagaccctgaggctggaaggcacacctttaatctggaccacaccttcgcttggaagtgtgtctctgtgggagtgatgctggaggccaggggagtatacagcaggtgacaattagtatttaacaggtcaaccaaccagatgaacaactctgtggtgggagccccacttggcaaagaccatggggtcgctgattgtgaatgattggttgtctctctcatgtgctagctatgggtattttacccactgcttgtatgtttatctcatgaaaatatttcatctactgggcacacatatagctgtggatggtcaggaagatgatttctgcttaatctgtgtaattctgatgattagaactaatactagcatatttttcattactcagactgacataggagagtaacagtattctcagtcacaaagacagatagttttagatttcagaacaaattcaaagcaaactggttgcccctggagacaaataaacagggacaatttcccaggtatttactgctgatttaaggtctggcatgaaacaactttagtagatataactttctcagcaatggactttttgcacgtactcccaacctaaatgttcagccaactaactgtttattgtttaaatcctgaatttcaatgttactttctgtctgggaaccttggccactcagagctatgtgcttactttactcaccatgcctggtcagcatgacctccctagcctgagaaaaactgtgtgatcagtttggctctgtttcttattgtttactcaagaagtgctgtgtgatcctcaaaatgtgattcatattggtctagaggctgtagagggagtagaaggagagaaatgtgaggggtgtgtgtgtgtgtgtgtgtgtgtgtgtgtgtgtgtgtgtgtgtaaacagagatgtagctcaatgtgcagaaggtgaagcagaagaaatggagagagagtgtgatgagcagctgcatgtaaagagatgcagctatgtggagatggggagatttttaaaaggtgacgtaaaagagaaagttaacatcagaaagcatgtgtttccttgttcacgcctcagacagaaaagtctagccctcgatgcactggtggatttttagcataccctgggtgtggtctttgagttggctctctaaagactgctttaggctggactttgaggtctttttctcaagcttcactcagtgtgaccgttagctgacttcctgttgcctacaagatgtaggacactaggctatttcttcagcaccatgcctgcctgcatgctgccatgctccctactatgacgggttgaacctgttttctttgtaagagtctcctcacgtaataaacacctaaccaagacaatacatataattaaagaacacacactgtttaagtcaatactaactataaaatggagtcttattttttatttgaaattataagtgaatggaaagtatcattcatatattattaccttaaatgcagcatttaattctgggaaggaatcaaatgttgttatataaaaagcatgtactgttttccaatttcctgttgactcagctttttctaaatcttctctaaaaaacagagcaaaagaaacaaaaccatatattaaccataagtggagtgaaacatcattcaaataaaatagcatttctttttaaaaaatgaatgtcatataattttaaataatgaaaacaacataaatttgttacagttgatataggaatagcatataaatatatagttcttaattatattaaaatattatttcagctttaacttttttcatttacctatttttttccctaagagaatcttgttctgtagtccatgttagactcagatttggggtgttcctgcctcaggcttctgagtgctagttttattgatatgcaccatcctgtccagctaaaacaatttacctttgacacacatctcttttccttcacagtccagtttctggagcttttgcaatttacagctagaatctttactttctcattcccaatttagcatttcaaattatgtattttgattttctgaatagtgatatcacttttatagtatgattacatagtagatgaattcttgtgtgtgtgttttaatggtagagttcattatcttgttgctaaccttttgggccaatactgacttaagattctcttggtgtttgctttcttttgctacaacatatccactatccatcattcatgcatttatttatatcttcaacttgagataagttgtcaagatgtcttttgtgtcttcacttttgtttggtatcttacaacaacctacaagttcggctaaattttcaggtaaagatgttaagctatgtaaagcattggcatacagatcactatcagtctacaaaaaagagtgagttggaacttactcaaagtctttcacacttttgggctggctaggaagggtaggttctggaagggctggaaccttcacttcagatggtaatgcatccatagacatacgctgtttttgtctaacatcaagacaaattggtggtaggtctctcactgtgaagtataagagaatgtaatgtagtgaatcaaaacttttacaaattagaaaacatgaacagaaaacagtattttataatgcattcactttgggatcataaaacaaaaccccatttcagtgaatggcactccccaggcatttcacttctaacagctattaggccatgtcttccataaattcgtatcatttcatagctatttgactgtatcttacataaatagagtttactacctatttccatttctctccaaagtcatttatcaatgaaatgtatagttcttttttctctcctttctttttaaaggtgtctttcaaggagtatttcagtgaaacttaatattattaatacttattaactttttagaaacatacgaatcacttatacatgtcctctataatttgtaagtcttagcattttcttattagtgtccataatttccctgtccctttatttctaacttttgctctgacccatttttgttctttcaaatgttctattattttttgaagcagttacatatattgaatattttacttattgtggacatgcatttctcatgtgtcttcatggtcattccttagttccttgttataataaaaatgggactgatccagaccccaggaatgtggatttcagtgaggagacctcggaaatctacgggacctcctgtagtagagcagtacttatccctagcataggtgtggactttgggagcccattccacatagagcaatatttcctgagccatgacacatgggggtgggcctaggccctatcccaaaggatatgatagactctgatgacaccctatggaaggcctcaccctccctgtggagcagaaaggatatgtgtgtgataggtggtgttttagttggtggggggggcatggtaggggaggaggggagggagagggaacagggattgacatgtaaaacaatcttgtttctaattcaaataaaaaacatctgcatgttagtgaaatgttcctttgtttcatatttaatctgttttccattgtctaaaattataaatatctggactgttgtttataaagatgtttatttgcaccataaaaaatctgcaaaaaaggaaaaatacaaaatttgattatgatcccttttattgctaatttttacttgcaaatgttatttttgagctctcagaacctagtgcacctctgtcatttgctgtttctgtgtaaaagctaaacaaatggaagcttgttttctgagatctcctatttctgaaactcctattattctgaaactctcttattccaaggtccaccaaacagctttgctccagtctcctgatacattctgcccaccagctaataccaaggagaacttacatttttggttgtttgttctgcttatcttcaggggatcaagtggccattttaccagttaattttattgtaaactatgttcatgattttaaacactgatacatagtaaacctatgtagtgatttagggacacactttatatctttatgattaataaacttgtaatctaaatctcttctaatgtgtttttcttcattgaaggttatgtaaaccctcagaacaatgttcagtaatcagtaaatgatcatcagggtgctgatgccatcaatggattaatctactgatgagattcgagttgaatgactattaggaggtgtggcctaactagggcaagaaggttatcttttagtcagtgttctatcactgtgaagagacacctgaccagggtaactcttataaagaaaaacatttaattggggcttgcaaacagtttcagaggtttagtccattatgatggtggagagcatggtaacatgcaggtagacatggtgctggaggagtagctaagagttttacatttgaatttgcagacatcaggacctagcttttggacttttgaaacctcaaagcccatctccagtgacacacttcctccaacaaggccatacctcctaatccttttaaattgtgccacttcctagtgaccaaacattcaaatctgtaagcctatgggggccattcttattcaaaccgccagttacttgctggaagtgtgtgccttcaaaggaatttatcttatccccagactcattatctttcaccttccagcttccttgaggtgagtaactctacttcttcatctttgtcccatgtataatggggctaagctacaacagactgacacagtgactcaaaataactctttcctcccttcaaattgattttctcaggttattccatcctagttataaaaagataaccaagatagtctgttttagaataaattttcatattagaagatagagtttccatgttttcatactccagagaatatggctttccagcttgaaacactgatggctgagccctccttagattgtgcaatgaagcagattgggaaaggacacaagagtttgatttctaacatgctctcaggtgatgctgatgctacttgtctaggaattacactgtgatgtactattcagtcaagtgatatgagaagacagtgatgctgacaacatacaatagatttattacatttgtttccataattattttgtacctcttactaaatatgcaaatattaaagatgtagcaatttgtaatgtaaaaaaaagatttgataaaggcttgatttattagcaagtaaaatgaaacatttcaatacatgacttcttatgcttagaaatttttattaacaggaaggggcattttagaaaagaaataaaccctggtcttgttacaatggtgtttttgtggtgcttctagtttttctcattcttcactaggcttatccttccctatcccttcccacacacttttctcaacctggctataaacacccactattaaacacaaacagactcattcaaatacaaattaacttattcacaaactaagcctatatgcatgtatttttcatacccactcgcttttattaataccacgctgaggtaaaagagcagtgaaatcaagttagtaagagaacttgattttggcagcgcccaagagtgggaggagtcttacataagagaactagtaacgctaagaccaggaggattggccagtgaggcaatcagaggctctatttttagtttcaaaggtaacttgactgaaaaaaaaacaaaccctgcagaatgttaacatatacgttaatgaaatccaagtctgaaaggggttgaatcctttgctcatatcagtgaatgaaagccaaattacaggatgtgacattcagctattaagggaagaaaaataacagttcacagatgctcctatgtccccaaatatcaaggcattgtttttagagataggctttctgccttttccacagatggtttataaaaatttaattcaaaagagaaaaccaataactatggtgattaattaagcctcatatcgatgtcataaaatagaactggaaaatcttcgtcctgacatatgcaactctgcaatatagaaagctattgtaatacagtaaaaaagcaaaattacatttgcaaaaacctgccatttaggtttcattcagccaatacttgggaacactccgtgctaaattgataagcagtaatcattttccttccttttaataactgatgccaattttagttggttgcttagaaacattaagtaaaacacttgaagtcaatgtaagaagaacacaactgtggtgaggtttggtagtatattaaaatgtgtgtggactgtaatacagttatgtataaaggtgcgagattaccagcaaaattttgccatcgcattatttctgttggttgactctggttgaaaatggtatatgcagctttcaacaactgcaataatcaaaatggaaactgatatttctattggccatatagagactgttcctgcatagccatcagatagcaaaagtagctcagagataaacaagagtgtcaatgtagattgtgtgttcaagagacggaacctgggtctatgtgctgctgataaggaagtaatggcatacaaagagttgctgcttttcatacacaacagcaaaatactatgctccaagtttcataaagaatggaaaagcacaaaccttgaaaacaagggtctggatctattgcttcctgagttactgttaacctcagtcactgaagctcttggaacctcagctctgatacaaaatgaatgaaatggtcagtcattcctaaggtttcagagaatctgaaaggccagctcaggcatgtaactgaatggactgcttgacttccaggagtagctcatcctttctttgcttaagatatcagcacttcaggactcttcatcttgtaactatttactgctctagttggaggtatgcacctgagagagctgagcctaaaaatgaggcgggccagtgttgggagccgaatctcagggcttggcatgagatcctaggccatgcttggcaggccacatagttaaccttacatagcagctctttaagaacctcagctcaagaaaataaacaacctgacccagtcctccacccagaggctcagtcacctaggcaaccctccctggacctcttactcatgaactctttaccctgccaaacatcctctttgtggctttctaatatcctgcctacactaacatctggcttacaaacaacccattccgcccctccccatatcctgactataaaagctagcctgagaaaagtaaagtttgccacttgatcagaatcctgtcttgtggtggatctttttgcgtttcttgtctccattccctatccctgactctcttgccccaggttgatgtcctgcaggttgggacaggccaaagcctcatgcaatagccaggtttattcagagcatcagacaatttatactctgaaggttagtcacctgagttaagtttaaaatcacaaggacaagcttcatatggcaaaaaattgcccccccccgacatatgaataacaacagctaaagtaaactcactcctatctgctacacctgggagtagcaccaaaacacatcccaagaacaattctgttttgaagaaactgaggtcacaagactcttgtctgttttcttggagttttctcacaagcactcagaattcttatatgactccattcttggactgtgttctgacaactattcaaaacccaagtggacaggatctactacaaaataatcaaatataaaaaaatctcttatcagtgtgattaatacgctctgtaacagagaagttgaagcagtgaaggaaagtaaaatgtacatgccacctaaaagcctcaaggggttcttgagctgaggttctaaagagctgctatgtaaggggaggtatgatgtcctgctctacagcatgcctttttgtgttttgtttggttttgttttttgagacagggtttctctgtaactttggagcctgtcctggaactctctctgtagaccaggctggcctcaaactcaagagatccacctgtctctgcctcccgagccatgggattaaaggtatgcatggccaccacccaaccaccacaacatggtttacaaacagttttggaagaattaaaaggagcaggttgggtgggctgggttctggaggaggtaggctggagggggagagcaacagcttgatggggaggcattttggggctagggagaaatatggcccaagggaaaaccccaggaatccacaaggagaaccccagattagactcctagcaataggggagagggtgcctaaactgaccatctactgtaatcagactggtgaccatcctaattgtcaccagggatactctatccagtaactaatggaagcagatgcagagatctacagccaagcactgggctgagctctgggagttttgctgaagaaagggagggggattgtatgagccaagggttcatgacagggaacccacagaaacagctgacttgagctcttagggagctcatggactctggagcaacagttagggagcctccaagggactgactgaggtccttcctctacttgtgggtgacagttgtgtagctttggtctctttgtaagattcctagcagtgagatcaagacctatccctggcacttagttggcttttgggaacctgttccccatgctgaattaccttgcacagccttgacacaaggggaggagtaaggggaggagcttggtcctgcctcaacttgatatgccatgctttgatgtgcccatgggaggcctgccccttcttgaatggagatggaggagtggaaggggagagggttggaggggtcatgaggaaaggaggtaggggaaacttcctacagtatataaaatacatgaaaaaatgttacttaaataaaatgaaatgaaattttaaaatccttatcttcttttcccaggtctacatattatatccacatatgtagttttaaaatatgtccacaggttctccgttagtccttcaatcaaaagagtcaggagctggagagatggttcaagctgttaacagcactgaccgctcttccaaaggacccaggttcaattcccagcacccacattgcagttcagaactgtctgtaactctgtaaaaagtaggaccacagagatggctcaattggtaaaacacttgctgctaattctaaggatatgagtccaatttctggaaccagcatggtagaagcagagaatcaactcccaaaagcgtttattcagtggaggaactgggacaccaaccagccacataacctacagtctgtccagactatgagatgtgctggggttagggtagtgcagagactgtggccaaccaatgactgttctagcgtcagacccatgctacgagagtgaacccacccaacactgcctggagcacagaggctggatggcccagagacctaggatagaaccaaacatgactggagacaaaataagtcaatgtaatgatgtctaatgatattctgctatactcatagattggtgcctatatcaactgtcaccagagaggcttcatccagcaactgatggaaacagatacagagacccacagccaaacattaggcagatctcagggaatcctgctggaaagtgggaagaaggattgtaagagccagagggatcaaggtcatcacaagaaaactcaaagaatcaactaacctgtgctcacagagactgaactgacaaccagggagcctccatgggactgacctaggtagtctgaatatagctgttgtatagattagtcttcttgtgggactcttaacagtgggagcaggggctgtctttgactcttttgctggcttttgggactctattcctcatattgggttatcttgctcaccttaatacaagggaggtgcttaatcttactgcaacttgatatgccatgttttgttgatatccatgggaggcctgtacttttctgaatagaaatggaggaggagactgagggggcagggaggtggaggagggacttggaggagaggagagagggaaaactgcagttgagatgtaaaataaataaaatttaaaaattaaaataaaagacagcctagttgccatccctttgaatatgggccagtcttgatgaatgcctgttaataaaatgtggtacaagtcataacttgatcataaaaggccatgcaagttttggctttctctttggggacatttagtctcataattcagtcactatgctgtacagaagctaggaagccacataaaaaggtcacatgtaggtgcctagtccaagtctaatctacagtccaagatttgaggtacataaatgctcagcaagtcttcaggtgaccctaggtccctcatttttcaagccaattcagatgatgcttacgagaaaaaggtccccttccaaattatacatttatgaattaaataatcattgccattgtcttaataactaattttgaggtggctgttataatgcaaatagataatggaaaatgtaactttgtgcaaatcaagtcatttctcagaatttcatgtctcaccttttaaacaaacaaagagggctgaaggaatgactcagagttaaagagaacttgctgctcttgtacaaacctgggtttggttcctaacacccatatctggcaataagaacttcctgagatggttcaagggtatatgataccttttggggggcttcttcgggaacttgcatgtatgtggtgtacatatacataaacttgggtatacacacatacacaataaatgtttttcttaaaggaacaaatggaggcttttcaagataaacagccaaatgagtagcctttttatttctctcaaaattccattaaaactacaacaaaaggttctttgttactttcattacataaatctgcagattcaagaagaataagccaaaggctatattgacctacaagtttttcctagaatttaaatacaggagatgacagacagaaaagaatatatcataagaaatttatttaaaaggactcaaactaaggcacattaccctgcagtttcaaaacctgagagacaaaggaatggttctacaagttttcagaaagtgagttatggagacaaaacagaactccagagacagttgtcttactaaaaggatcagaaatcacagtggtcccaaacagagcttattctgcagagtggacagaccatttggagaattagtaatttatgacacttgtcatcaccaagatcttgactgcctttgtgttcttctgaaactgaagagagactgaacaggaaaaccttgcacagactgacttactcttgggtggcctgccagtgtgctggtgaagtccctgcatttctcctctgagtccaccatctgaatgagctaatgatactcaggtcactcacacttttgtgctcagtaccctgggcagttgaaaaggccatgtgactgctagacatcaaaggcattgatcaaacaataacccaaagctgttcatttcacaggagggttcagatggaggtaactatagacaaggagacagtagtgacctctgagaagaagggcaatgcaactgaagtgggctcactgagaccctgctggttctgttcttttctcgattgaagtgctgggtttcaatttaaccactattatatccatttgaatttaaaaattgtgctctcagttgctcatgaaatttcatggggtaacagaaactgctttatcaaaatcccttctacaattctgtaccatacaaattatacagatgtaaacatgtactgatatgtaaagtaaagcctttgtgcctggctctgagggaaatgtttcagcaaagcctttgctatttttgggtcaatcagtagaagcttagaaattgttttgaggctgtttgaagcctgaagaaacgttgtctgtctggagtatctgcagaattgatgctacgtgagagcttgcggctgcactgaccttggtctaaagacactcctggcagacctggagctcttacatttgattacggctggcataattaaaagggactgagatttgtgtgggttgtctgctttcatgggcagcaaaagcaagataactttggtagctgggacttttcccagccctaattaaccttgtatatgtttgagtaaagtaacttgagtgagctagcctctctactacggcacctaagaccatcattaaacaatacaaacataaaaatttactcatcatatacatttgctgaactttataaggcatagaactgaatgttttaaatgctttttttttcattatccttgtaactttgcagaacagctatttattgccttattttacagatggggaaataaatagaatgagattaagtaacttttctagaatggcagtttgtgtattacagagcctggattcaaacctagaacaaaaagctataaaacctagattatttccactgttgaacagtgtccaatcttctatcatgaaaaaaaccaaggagcaaaagggagacctacttggaaacaggagctaataaactgtattatgtatcaaaaatatcaccccaacaagaacaaaaacatccttcaaagatcaatcaaaaccaatatcctggcaaattccatcttaaatattatttatattataaaacttaggggcagaagacagcttacagctcatcacccacaactgcctcattctatgattattaaacaaagtctacaagggttaggtggttaagagtggatggacagttgcaggtagtcaactgacaatgtgagcaccaggcaaagcataaaggaacaatctgaaggttccctctctcagtgcagttcttgtgctacttttgactacttcagttttggcatgaagcagaaacagggaagaccagagtagattagtcataacagatggtgtttatatcacagtctataagagtacttttttgatcatttagcaaaaataaagccaaaggtgggagaaaggaagaaggtgtgtgtgggggaatcctataagtcatagaacttgagccatcagagccaaataaagcaatgcattcactgattttggagacagacttttaaccaaattcagtggggtggatgtaaaactgagcatgagtgaaatgttctttaaaggacttcatcataaaaatgcaagttatttctatagacactcatctataatgaaatagatgcttcatactagattgtctacagaaaagactagagaggatttgataccccagcagggcaacaggccagcctagaaaaagtgcttccttttcctttcttcaatcaataaattatttaccaagttcagactcatgggtcatggatgctgagccatagagacagactaagatgaaaaactcaagaaagttagaaatacatacatgcccagatctgacagtcacatttccatgaatatcttacaactattttgcagatgaacaaaatggctatgtatatagtcacttgttgtggtactgcctgtgcttaaaaaaataggtggatatgacttattttttttatggggtctgaatgaaggtgtacatctaatataatagaatacagttgtaaaaaaagaacgttaactcaaataaaacaactgaaaataacaatccaaggttggacaatgtacatgtcttttaagtagggaaataatatataggtttatatttacataaaagaatacaggagacagaacaaaacaatgtgatagtgacacaatgaaactacttatttttataactttctttaaaaaaaactcttgaacaatttaaactaatgtttaaaagaaaagccccagggagacaaattataaatctcagcagctgcccagaggaggaaaaatggagaagaaaaggaaaaaggctgagctatttgagtccagctggcagggaggtcagctgtatgaggtgggcagccacgtggctgggagggaagggttagaggagtgaggccaaagcactggggaagcctagtgttaggaaggatgcttagaaaagagaacaggaaaagggaaaactgtactttccaagtgacttagaaaagcaggccgccttctgaagctgcgtgtctgtggttctgtaagagactgcctgctgtggggtaggaactcgaggaagaagtacactatctcatgattattctaccttctctctaggacaacttaaggtgagtctacttctgaatcacatacatgtgatattcaaatggttaattctgatctaaaacaacagccctttctctctccaaaatatacacttaaggagcagagagtagtgaaaaagataagtaaactaatgcagtaaatttttttttccagatacacgtttttccgggaatagttaagaaaagaaaataactaaggcacttattttaacttaggggaagatagtagagatttggtttaagattagttcatgcttaaagtcatttgcggccttggagacattctcaaggtagaaaccataaagtggcatgtcctttgttctccccagacagcgagcctggcactgtttccgttaaccacttatttccatctgccctgcaaactgctcctaaatggaaactctgtactatacctgaaaatacatcacagaaccctcacacagaactaatcactgagttaagaccaccttttcctttggctatttcagagtgacaaaaatgcatttctcaagtaagaactcgagagctcatgttgcgccaaggccctgccaagaataaactcatgaaatcagctgagctggctcggaacgaaaccctggcctccaggtaagtaggagttctatccactctttcctgaaataccaccaaagaagagattttcaaaaggcttgaggaaaaactgctttgcttattttaaaggtgttttgtgctttttaaaaaaatgttttaagtaagtctaagaaagaatgcagggttacccacacagttccactcctctttacttatcttctaggtctctctctctctctctctctttctctctctctctctttgaagatgcatcatctctagcagctgttatagtaggtaaaacgcctacacttctcagctttttcaaaggacagccaacctgataggcttacctagttatgtgatctacagggaggaaaggatccctcagctgttagagaacccacgctgggcttcctcagcttctctaacacaacttggagatcagatgggagacaagctgttgagagaatacctgccacaggtcctgctaacaggaaaggacaaaaagggtaataactgctaagaatcaaacttcgtaagaaatagtcttacagacaagtgagggatcttttcaagaaaccaaggaattatcaggagacctccatgatgaggacttactccaattctcattcaataaaagaattcttcctgtagcaccttcgatatttgaacacaccaggactaaggtgatattcagacagaatagccagatgtctagacagagttctattcaggtaagacctattcacatagagtgacaagtgcaaaaattccaatgtgactgagtttgggctaagtccagattccacaagactggctcctacgagaagaaaacaggcaagaagtaagagttcagctaggtgggacattaaatttagagtcaacaaatctactcagaaacctgtaggcagcacaggaggtgacaagcctagttcacaaatcaagtcatctgtacaagagacaggcttacacatggctcacagacacaggaggctgaacacccgcacataaaataaacacccataagtaaaataaaaaagaaaggattaagtagaatcagagaatggagaatcaaaggctaagaaatttgagtaaacagttcaaatgaaggttaccactatataccatgctttgacttcctatcagtctccttagcacacatttcagttttgttaaggtttactaggtctctgctctgctcaattgtgttcctgtatcctcttaatgacatgctaaagtcctaaaccttaaaccttcagatttgcctttaaatagggagactatccaggtaggcaaaaaccaatcacaacatccccatagaagtgaatcttcccactggttgcaaaaggcaaacctgaagagactgatatcataaaaagattctagaaaaggaacctgctgctgaccttgaaagagtaagctaaggcacatgagtcaggaaaggtaatggcacaccagtcttacaaacacaaataaccaatttgccagcaattgaaggagcttggaaaagaatatctgtgcagagtccagcccaaccaacatcttgatttcaatcttgtaaggagtctaagtataaaacctagctccaatcatccagacttctgacctacagagcggtgagctagtaagtgggtgctgttgtaaaaccattagatcatgacaattcattatgtagcaataaaaaacaaatatgatgagattttacttgactattgtgaggatccaataaaaattctttctaaatgatatgaataaatgctattatctagttgatatgtctaaatagagatcattttccataactcatctaattagtctaattttttaatttctctatttctataatgctaccacaattatagctttgttttaccgtgttgtggaactgtgtaaaacatatacgtttctgggataggacccctgtgtgagggtatgggtgtaaataagtcagaggaaggaagatgttatcaaagacaggctaacaaatgaagtgctatcgatctaatctctaagactgtacagtaggtctaatgttagcatgcactgccaaaaagaaaatttttgtaagaataatttatcacatatgtagttattttgtttggctagaatatgaggggaatcaaaagtccacagatttgttttgtgttttcacagggtaagggatactaaagaaaacaaataatttacattttctatgataaaataagttatataagaccaggtggtggtggcccatgcttttagtcccagtgctctggaggctccttgggtttgagactagcctggtctacaaagctagttccaggacatccagggctacacacacacacacacacacacacacacacacacacacacacacacacaaaaaaaaaaaactgtctaaaaaaagttatataaagaacatatacccaatcctcctgatggaaactattaacagatctgtgaaaagccttatagaataatcgaaatgagaacaaaaggtttcatctacttcaaaatattggaggcgccaggcggtgataccaggtggcggcagcggcagtggcagtggtggtgggttgtacgcccttgggagtcagaggcaggaggatctctgtgagttcaaggccagcttggtctatagagcaagttccaggacagccagggctgttacacagagaaaccctgttttgaaaaaaaaattggagtcacaacctacctttaatcttataattgcttcttttaattttataatgtactatgtgcatttcctccagttattttatatcctcatcacattcttttttaatagaagcacagcattgacaatacacattgacacaatttagttaaataatctactgttcctactataagcaatgtatcctttcccttctatctctgcacacagatgatgttattttcttggactaaactcctataggtagaattactaggttggcaagtatttctacatagttaaaaatcatctggctagtctttcagtacttttataattaaaaaaaaacattatttctgagaggtctgccagttgttctaattatgctttttgagtaatttaataccatttatggcactctgagggcaagtgtcctcctacatcctcttggacatttaattgtataaatcaagtacagaatgattttgccaagttttccaaaagaactgttgaaattattaaatatgtagaataaactgggtgatgtttctatggtttttccattcaattttttttgtcttttgatagtttcttattttctttatataagttttgcctatttcccttttgggtttatctctagtatttcatatactttccattatgttttctaataatttgctgctcaaatattggcagtatattaaacatttgtatcatatttttttgctgtcatgagctcagaatatgaagtgcccccataaaaaacgaccatgtgttgaaggcttaacccataggtggtggcaatgctgaggtgtgaatgtgtgaatttcatcaatctcctaaatctacccatgagtttatactaaagggaccattagaaagtagggcagaaaatagatcatgggggtggtatatgacttttaagggtccatcttatgcctggtcccttcttgcctctttctctctttgctccccagctgccataagtagtcaactatcatctcacacgccctcccactttgtgttctatcctactacaggcatggaaacacagagccaagtaacccgaagtcaaacctctaaaaccatgagccaaatataagtccttattcatttagcttgtttctctcaggtattttgttacaatgacagaaaggttaattcaaatgtatcatacaaagatacataaaatgtattttacatatatatatgtaaaatactctacatatattatagctctctcctctagacaacagctaaaagttttaggttaaaagtaacgattctcgaccttcttgtaaatatttacatagtttatttctcttttttgtaatagctaaacttacaaaaaagtgctaagtaattgaaaatacattttaagtagtttaatactataacacacttccagccaagacacatagaccattaccattcctgatgttagggagagccagatgggcaggtgagcttctattttcagcagcttctttcttctgggtaaccgttgaaacaaagctgctgaaagtggaaatctggctcttggatcctctgtccaagccctataaacaaaacatttaaaattgtaacataatttctcctgactgtggttaagtaattttactgtaagaatcaaagtgttatcatagagattaagattttatgacagaaaagatgatgaaactattataatcacactaaccaaattctcttagtataatcgagccctgtcaatcatctgagtacttactgttagtactcaggcatttgtactggcctgtccttggggttcttgcaggatacatcctcagctgcagcactaagagcaccacctgtgcacattcactacgttccctttaaaaagggccctgcccacctcccagccttctttctttctctgcccctgtccccctctttccctctctcctctctcctgctgctcctgtctctgaagactggtctccctccttcccttttccccttttatgatccctttccctaataaaaaaacctctctgcttgaaccctgtcgcatgacatctttctcccacgtgctgcttttcttaaagtacaacgcttacaaactggtaaggtttagagggggatggtggtaatatatctatttcatagttatgagttaacaaattctactcacagaatagttagcactactccttccttgcacacaatatatattccataaatgttaactactttaattatgtatttagataatactgtttttatgcactccaaatctattagttttaatatattatgaattacattacaggttgattcattaaattttcaaataataatttgatgcaactttaaaaattcatataatggttcatttacactatggagtactactgggggaaaaaaatgaaatcttgaaattcaaaggcaaatggatggaagcaaaagaaaccatcctgagtgaggtaacccagtcacaaaaaggcaaacatggtatgaactcactcatatatggattttaggcatggagcaggggatggccagcctacaatccacactgccagagaggctgggaaacagggagtaccccaagagagacatacatggtaccctggagaaggggaagggaacaggatctcctgagcagattgggagcatggtggggagggaagagggagctgggagaaagaggaagaagaggaggggagaggaggaaatgggggagcaggaaggttgagtaggggaagaatagaggagaacaggatgagagatatcataatagagggagccattatagatttgaggagagatctggcactagggatatttccagagagctacaaggttgacaataactggcaatctaagcaatagtggtgaggctaccttaaatgccctcccccgataatgagattgatgactaccttatatgccatcctagagccttcatctaatggctgatgtaagtagaggcagacacccacaactaaaccctgaactgaactcctggaatacagttgtagagagggaggagtgatgagcaaaggggtcaagaccagactggtgaaacacacagaacagctgtcctgaacaagggggagctcatgcaccccagactgatggctgggaggccagcatgggactgatccagaccccacgaacatgggtgtcagtgaggaggcctcgacaatttatgcggtctctggtagtagatcagtatttatccctggcatatgaatggactttgggagcccattccacgtggagggatgctctctcagtctggacacatggaggaggcctaggccttgccctggataatatgacagactttggtgatcccccatggagggcctcaccctccctgggtagcagagggaggatgaggtagggggctggtgggggtaggggaggggagggagagggagctgggattgacatgtgaagcaggcttgtttctaatttaaatttaaaaaggtataaaatttcatataaaatgataaatcctttagtgttgatttttttttttacaaagcattataattaaattgtgggtatgtcaggatttaaaaaagtgttctaatcatgtagggatcattaggtatagatcacagagcactctaaagaagaaactatccgattccgccgccgaagactgacctggaactaggtgagtgagctcctgcccgctcccgaccccagaccagaacaccccaccacccccatcccaccacccccgcctgagcctgccggcttgggccagacacgcccagagagggaggagccccctgccccaccaatctgctagcaccccattcttacattccgccgccgcagactgacctggaactaggtgagtgagctcctgcccgctcccgactccaggccagaacaccccaccacccccatcccaccaccccctcctgagcctgccggcttgggccagacaagcccaggcagggaggagctccctgtgccccaaatctggtagcaccccactcttccattccgccgaacgaccaagaaactaggaactagcgaggagaccaccaggagcgtcgagatcatctagagttgtggacatcgaattcctagcccccacacaccactgggccacaagaggagatagagagaacccacccgcacccactaaaaggatatggggagaagacagaataagatttcactcaacaacacaaagaccaacatgacaccaccagaacctagggactccactccggcaagagctgaaaagcccaacacagagcatgaagatgagatggacctcaaaaattatctcagcaagttgatagagacctttaaagaggaaacaagaaaatcccttaaagaaatagaagagaaaacaaacaaaaaattaaatgaattggaggaaaagacaaaccaaaaaattcaagaaataaataaatctcttaaagaatccaaagaaagccaagaaaaaacatccaagcaagtgaaggaagctcttgaaatagttcaaaacatgaaagctgaaatacacacaataaagaaaacacagaatgagaccatgttggaaatggaaaggttggataaacgatcaggaactaaagatgtaagtgtatccaacaggattcaagagatggaagagagaatctcagccactgaagactcgctagaggatatacattcatccaccaaagagaacctcaagtccaacaaaaccctaacacaaaatatccaggaaatatgggacaccgtaaaaaggccaaacctaagaataataggtgtagaagaaggtgaagaaatactgctcaaaggtacagaaaacatattcaacaaaatcatagaagaaaacttccccaacctacagaaggatatgcctatgaaagtacaagaagcttacaggacaccaaacagactggaccacaaaaagaagtcccccgacacataataatcaaaacaccaaatctacagaataaagagaaaatattaagagcagcaaaggaaaaaggccaagtaacatataaaggcaaaccaatcagaatcacacccgacttctcaatggaaactctgaaagccagaaggtcttggatagataccctacaagcactaagggagcatggatgtcaacccagactactgtacccagcaaaactttcaatcactatagatggagaaaacaagatattccacgacaaaaacagatttaaacaatacatatcaacaaatccagcactacagaaggctctggaaggaaaactccaacccaacgaacataactacactcacaaaaacactgtcagtagttaatcgaatttcaccaaacacaaaaagaaacagaagggcaaaatccacacgcaatgataccaccaacaataaatccaaaactaagaagaaccaatgaacaatggacgttaatatccctgaatgtcaatggtcttaacttacccataaaaagatacaggctaacagaatggatacgaagacagaatccatccttctgctgtttacaagaaacacacctcaaattcaaagacaggcgatacctcagagtaaaaggatgggaaaagattttccaatcaaatgggctcaagaaacaagctggggtagcaatactaatatctaacaaattagactttaaactgaaagcaatcaaaagagataaagaagggcatttcatactcatcacaggaaaagtccatcaagacgaagtctcaatcctgaacatctatgcccctaatacaaaagcatccacttttgtaaaagaaacattactaaagctcaaaccacacataaaaccacacacacttatagtaggagacttcaacaccccccttataccactggacagaactactagacagaaacttaacaaagaaacaaaggatctgaaagaagttatgacacaactgggtttaacagatatctatagaacattccatccaaacacaaaagaatataccttcttctcagcgccacatggaaccttctcaaaaattgaccacatagttggcagcaaagcaaacctccacaggtacaaaagtattgaaataaccccctgtatcttatcagaccaccatgcattaaagctagaattcaacagcaatacgaattgcagaaaacctacatttacgtggaaaatgaataactcccaattgcaccattccttggttgaggaagaaataaaaaaagaaatcaaagactttctagaatttaatgagaatgtagacacaacatacccgaacttatgggacaccctgaaagcagtgctaagagggaagttcatagcactaagtgctcacatgaagaaactggaggaaagtcacattagagaattgacagaacaactgaaagctttagagcaagaggaagcaaactcaccaaggaggagtagacgccaggaaataatcaacctgagagccgaaatcaacaaagtagaaactaggaaaacagtacaaagaatcaatgaaacaaagagttggttctttgagaagatcaacaagatagacaagcctctagccaaactaaccaaaaggcagagagagagcatgctaattaacaaaatcagaaatgaaaagggagacataacaacggacactgaggaaatccagagaatctttaggtcatactttgaaaacctgtattccacaaaattggaaaacctaaaggaaatggacaactttctggataaatatcacttaccaaaattaaatcaagatcagatagacagtttaaatcgaactataacccctaatgagatagaagcagtaatcaaaagcctcccaaccaaaaaaagcccagggccagatggcttcactgcagaattctaccagaaattcaaacaagagctaattccagtactcctcaaactgttccacacaatagaagcagatgggatattgccaaactctttctatgaggctacaatcactttgatacccaagcctcacaaagatatgactaagaaagagaactacagaccgatatccctcatgaacatcgatgctaaaatactcaataaaatattggccaaccgaatacaagaacatatcagaaaaatcatccaccatgatcaagtaggctttatcccagggatgcaaggatggttcaacatacgaaaatccatcaatgtaatccactatataaacaaacttaaaaagaaaaaccacatgatcatctcactagatgctgaaaaagcctttgacaaaatccaacatcccttcatgataaagatcttggagagaacaggaataacaggaacatatctaaacatgatcaaggcaatatataccaaaccaatagccaacatcaaagtaaatggagagaaactcaaagcgtttcctctaaaatcaggaacaagacaaggctgtccactctctccatatctcttcaatattgtacttgaagttctggctatagcaataagacaagaaaaggggatcaaagggatacaaattggaaaggatgaagtaaaactttcactatttgcagacgacatgatagtctacattagtgacccgaaaaactctaccagggaactcctacggctgataaacaccttcagcaaggtagcaggatacaaaattaactcaaaaaaatcagtagccctactatacacagatgataaatccaatgagaaagaaatcagggaaacatcacctttcacaatatccacaagcaacataaaatacctgggggtaacactaaccaaaaaagtgaaagacctgtacaataagaactttgagaccttaaagaaagaaattaaagaagataccagaaaatggaaagatctcccatgctcatggataggtagaattaacatagtaaaaatggcaatcctgccaaaagcaatctacagattcaatgcaatccccatcaaaatcccaacacagtttttcacagacattgaaagaacaatactcaactttatatggaaaaataaaaagcccaggatagccaaaacaactctttacaataaaggatcttctggaggcatcaccatccccgacttcaagctctactatagagccatagttctgaaaacagcttggtattggcacaaaaatagactgatagaccaatggaatcgaattgaaaaccctgatatcgacccacgcacctatggataccttatttttgacaaaggtgctaaatctatacaatggaaaaaagacagcatcttcaacaaatggtgctggcacaattggatgcggacatgcagaaaattacagatagatccatacctgtcaccatgcacaaaacttaagtgcaaatggatcaaagatctcagcataaatccaaccacactgaatcttctagaagagaaagtgggaacaacccttgaacaaattggcacaggagaccacttcctgaacattacgccagaagcacagacattgaggtctgcaattaataaatgggacctactgaaactgagaagcttctgcaaggcaaaggaaacagtcagtaggataaaacgaccacccacagaatgggaaaagatcttcaccgatcccacatctgacagaggactgatttccaaaatatataaggagctcaagaagctagccaccaaaacaccaaacaacgaaattaaaaagtggggtgcagaactaaatagggaattctcaacagaggaatctgaaatggctgaaagacacttaaaaaagtgctcaaaatcattggccatcagagaaatgcaactcaaaacaactctgagataccatctcacgcctgtcagaatggctaaaataaaaaacaccaatgacaatctatgctggagaggatgtggagaaaaaggaacactcctccattgctggtgggagtgcgatcttgtaagaccactctggaaatcagtatggcggttgctcagaaaaatgggaatcagtgtacctcaagatccagccattcctctcttgggtatatacccaaatagggcatgtacttacaacaaggacatatgttcaaccatgttcatagcagcattgtttgtaatagccagaacctggaaacaacctagatgcccctctattgaagaatggattgagaaaatgtggtacatttatacaatggagtactactcagcagaaaaaagcaatggaatcttgaaattcgcaggcaaatggatggaactagaggaaaccatcctgagtgaggtaacccagtcacaaaaagacaagcaaggtatgtactcactgatatatgaattttagacatagaacaaaagactaccagtatataatgctcttcaccaaagaaactaggaaacatgaaggactctaagggttaaatggtccccaggaatggaagtggcatgaactcccgaactaattgggggcatgagggtgggggggggaaggagctgctacaataagagcaagagaagaggagaagaggagaggaaatggaggggcagaaacattgagttgggggaagaatagaggaaagagagcaagatgagagaaacgatatcagagggagccactgtaggcccgagaagggatcaggaaccagggagatctccagagacctacaaggatgacacgatctgacaatccaggcaatggtggagaggataacctaaaaaccctccccctaaaatgagattgatgacttctctttatgccatcctagagccctcacccagtggctgatggaaacagagacagacatccacagatatacaatgagccgaaatcgggaatttagttgaagagagggaggaatgaagaacgaaggggtctgtactaggatggagaaacccacaggaactgttggcctgaacaagggagagcacatcgaccccagatgctgtccaggaggcctgtacaagactgatccagaccccagaacatagatgtcaataaggaggcctctgcactccagggagcctctggtagtggattagtatttttccctggtgcaagaagggactttgagagcccatcccatatgaagggttacactctggccctggacacatggggaagggcccaggatcagcataggaagacttggtggactttgctgagctcccgttgagggccctaccctgcctggggagtagtgggtggatggggttggggggatgggctgggggtgggggagaaagtttgggggtgaggggagggagagggagaagggacttgaaataagcttgttccctatctagaactaataaaataaaataaaattaaaaaaaaagaagaaactatccattaacacattttctaccccaacaactccaaaaattcttaaaatatttaattacccatattttgtaaaaaaagtaaaatataagaagagcacaatttagttgtagtgctgactttaggccttttcttaggtcttagatttttataaacttatgttttcagaccttaagttgttttgagactaggcctcactatatccctgcttgtctgaaacttggtatatagcttagactgcccttggactcctgtctcagactccccaatgctgagatcatagacacacaacaccatacccgactattcagctcccagaatcttgagaatagtagttaacttcttcatatactttgttcacgtttcatgtgtgtctctgtgtgttgaggggtgtgcatgtgcacatgtgcgcatgtaaatgtgtgctgtgttgtccaggtggaggtcagagggcaacctcagggaatctgttctctccttccaccatgtggatgctattgattgaactcaggccagcagtctcagtggcaagcacctttacccaccaagcaatcttcagtccaacatctactttttaatctaaaagtagttttattttcatagtagcaaaatacagagtttcttttttacttctttattcactcaccagattgattccatttacccttttaaaagccaatgcacaatatacatacagcagaaacgatggtgctcaccaaatattcatgtgttctctccaaatcgcctgtccttttctagagccattagtaatcctgacagctctcatattggtccattatgctactctacagagtccttattcatcacagggcttgacataacttgtgcacaggtcctaaatccaacaggacaaaatgacagcctacagaatgggaaagattttcaccaactccacaactgggctagtatttataatatataaagaactcaagaactagacatcagcaaaccaagtaatttaaatggggtgcagatctaaacagaaaattatcaacagaagaatctcaaatggcgaagaaatgcttaaggaaatgttcaacatccttagctatcaggaaatgcaaatcaaagctactagcagggggactgaaattctaaagaatattacaccccttcttacacttagacctgccacaatactataattgattttcagggtttttagtcttgtcttcagttctacagaatactagagatgaaatcttggaataaggccagtctgcaaacagtgggctgtatgtgttgaagagtagacagcagcaagatactcaaccagctgttacagatggaagcacaaagaactgggggtgggagggggcagggagttgaactttaaaaattcattgaaagaaaaatatactcaaaatacttcagcctagtaaataagtaatagaattcattctctggtcagagatagcccatgaatttattaaacaagttcatatttcaagcagcagaaaagttttatgtagtaattataatttttattttgctagtaccaaacatgggcctccatagttttctgactatataaacatgaaggatatatgtaatattacaatcttaaataatatgagaaagttaaatagacaaatgcttagaatacctgctctgctcatattaacacataatgatgtattttcttttttttaaagcaatgctttctttttgttttgtagtttttaaggttttatttattatgtatatagtcatctgcctgcatgccagcagagggcacaagatgtcattcaaggaggttgtgagccaccatgtggttgccgagaattgaactcaggacctctggaagaacagtcagtgctcttaactactgagccatctctctggcccccataatgatgtattttcggccttattttctttgaatattggagtcctactttaaaagtttactgaggaacaatatgagtcaaacttctaatgtctgaaattgtatttttctattagatacccaaaatggaggtattcaggcttcactgaccacttttaaatactaatttctgttgtgtatttgatttagtacaatttactttgatcatcctctatcctccaaaactgccttagaagataaacatttttgtttttttctatcacaataaaggtataattgcctctgtttcaacacacaatgctataaaatggtaccatctccccctattttacagtctctgaaatacaatattttaagtggaatttctacgtctacaaatccaatcttcactctcaaggaatccaggatagactacctatgatggatataaaaactactttatacaagagtacatagtttcctgaggtactcagtggaggttattatgtcaaacaagtagcaaatacatctgtatgttttaagttaaaataagcaatccttaagatctcttgcttgtcaatttccaaaacaagctctcctagctaccaatcaggagcatatcagatgtatgtatatttagaatccataaaagaactatttgaggtcttgataccaggtaaagatatattatctttttatattctttccctcagttacgataatggattacaaaatcccaagtactgactttatattcttaaatcatgaattttcagctactcttaagttgtgaactctttttttctaaaccaattagcaccagcccccaataagaattttaatatgaactgtatcctttagaggagattaataaaggcattaagcaacaaactttagtgttcacttaccatcaggaggcaaggtagcctttgagatttattcatttgctgcacaacacacacacacacacacacacacacacacacacacacacacacacacacgaagctgcataaagatattacccttatgtatgcaaatgctttgaggctttatttttatatgtgtgtatgcctgagtgtgtctgtgtaatactcgcatgtctgtgcaggtgtagagaggcaagaagagggtaccagatcccctggagctggagccataggtagatgtgagccatccaacatgggtgttgggacctgaatttcagtcctctgtaagagcaataactgctcttaatcacctagccatttctccatacccaaatactatttttagaataaggtcacaattctacaactaattaataagaatcttgctgttctttataaaaatacctgaattaacacgaagttaattttattgtacctctgataactaaatttcagaataacttttcctttttaaaggatttatttatttatttatttacttattttatttacttattatgtatacagttatctgcatgcatgcttgcacaccagaagagggctccagatctcattacagatggttgtgagccaccatgtggttgctgggaattgaactcgggttctctggaagaatagtcagtgctcttaacctctgagccatctctccagccccccagaataacttttcaattcagcctaattagtaaaatttcaataaattttatatttaaagcatgcattaatactcattccagtctttgatccccatgcctggggctggggatggaacatgactttgttcattctggaaagtgctctaccactgggctacataccagcccaactatattcattcttaatattttaactgctatctaaaatgtcacacagatctctcttaaaataggactaccaacttaagaacaactaattattcatctaaggctcactgcaaaacatttttctatacatttaactataatgctagaaaaaagtaggtgaaagaaattaaagcttcccaaagccttctcagctccacccacctcctcattcatccactgttgatcttcttctcaactctaaaaataagggagatcattttaaaacataacaccaaaagaagttgctaattctggtaacactacactaatacccctttgcagctattttttcttcttcaagaagaaatgcatatgaattctcacatataccagtcatgaagagttcagagtgcagggcatccgatagctctgggaggatggggaagggatagactagtaaaggcaatagacacagagcttacacttgatacagagagctgagaaggggtaccaaaataataggaatagcaagggatggctgatttacaatttctcagtacagatgtagatttttatgtgtattattttagattttatatatattttgtgaggcaggcactattatttttctcactatgtacacaaagaattacaaatatcaaagtggtctcacacttgttattttgcaggcactttctggttcacaatttataaatttacaaacatggttttctccaattgttaaatatagtcaaattatttttgtcctacatcctggattaagcaagatgagagaataagcagatgtgcattctggttttgcagccaaaaaataaaaaagttgagagactttacaatccactcaaaattagacacccaggatatgtatttatatagctaccatctatcttttcttaactgaaaactctttaagaactattttaatctctctgagaagttatttttactttaccagactgttttgttttatatagaatttaattacatattcataccataacattaaacccaaatgatcagatattctagaatatacttctttcccataatattctatatttggaaacaggtttaaacaaacatgttgctggaccacatcctcttttccaaattggaattgctgctttgggtggaggctctttgtgacacatgtgccaccaagagggacacagaaagtttagaataggggaaagaacatgtttttgaaacaacctttgtatctcagtatcatttcaccctttagcaaggtacaagaaatctgacttaaatgtctgtcctgaaaaatgggataataacttatgcactgagttgttgtgtgattgttgttggtttcattaactgactaaatgacacatgaaaaatgcatagcacagagtatgcacttaagagttgttcttcagtatatacatttttgagagagacagagaaagacgaggggggggggacgggatggggggacggggactaacttgctgtgtagtcaactctcctggaactcaagagactggtctacttccacctcccccaagtgctagactgagagcatgcacccataccaggtcacacatattttttaaaatctgtactttattaaattgtgtaagatacattcaccattatttagaataaaatagacaaaaggcacagcatttccatatataagactgttccaaatgctaatcagggcagagtttaagtaagtttacacttacatacaaccacatacatacacatttttgaaatgttactggttggactgccttttttttttaatgtctttttttttctcctgagaaactttctctggaaaactttttgtttgtttgtttgtgtttttctctgtattactctttcttctcttcatccctggcacctaggttccacattgaatgaactcttccaccctaacactttattctgtgctctctactttaatggatgtgcttaccatctcaagcatgaaccacaatcctacttccttcactttcttcctcttacctcccccagtctaactatacactaccaggaatttcattatgttgttcttctattcaaagaattccaaaggcttcccattaaccacagggggaacgtccaaacttcttcagcccccaggcattcttacttacctcccacaagtccccagcacgcttccactgggcttgttttattgttccctaattcttctttttaggcttgctcatattattctccccactgtttactttgcatatttgcttttgctcatccagatcctatcattccttgaatggccagccagcttaaaaatattttactttacttcaaggctcttcttcacagttctgctctcactgatctcctatattgcaaactgtttatgtagcttatttgatgcttacacactgatttgctctttattcattagcctcacatcacctgagtcaggaccttgtaggtaagcttgtctgtgctttctgcagcatttagtgcaaagctaagcatcacacatgttcagtgactgcagttccatcttggtccagaggttccagcaaccacatttatacagaacataaatgtttcatcttaccctctatatatacaccttgtgtctttcatcaaactcttctcctacctacttgacacagttcctagtcttctatctgcaagcaaaattccctttgagattctaaactagggatggagaggtaactcaattgtagaatgtatgtgtacaaagccctaagtgttttatcctcagtaacacacacacacacacacacacacacacacacacacacacacacacacaccagtttaagttgatttctcttcacctccccagtttatataaaatttacctttcttgaatccattttattccttgatatatcccattccatggagaatctctttcctgttcagttcattaaatatcaaagcaatcaaacttgtcccctcttgcctcagttaattctgcctctcctttaagtattttcttctttttaaaaacatgtttttctaacactgcattaaatcagtaattaatttatgacattcatctccacgtcaacctgtcgaccgtggtgaattcggtatttccatcatcaaaccttcacatggacacactatttaaaattctttatttccttcagccctgggcttgcactccgtccacagcacaaggccgagcctccatctctgacagtgctctgagagctctatctgggcttcttgagcatctctcacagggccattttaacagccatttctttgagcagcaccactccagcatctctcatacagcatcgtaacagccattcctaagtagtcttgggatgagggtagagtttaaaaacacagatcttctaattcagtgtgtacagcatcagttttcactcttagctataccgaggagttaaaagaaaaatataatgcctccacttcattccctgaaattctgatttaaagagtttataatgtttcccagtgattttacttgatttcatcaaagactgaaaactagggtgggaacaccatgctaccaaagtaactttgtgtcagggatcttctgaatgcaactgcacttgacattgaagtaatgtcaggatttgtcaggttctagcattctctctcctatcctacagggagagcctcatctcctctttaaaccttcagaatataacttaaactttttagctttatttaggatcaacataatctggcctcttctttgtttcagagagctgtcactcttgcttgttttccccctgtcataaccatggcacactaattttctgaaaaagtcatgactatagggccacttgaattgaaacaagctcaacttggaaagagaaaaaaggaagaatcactaaaacgccccccaaagttactgatgtcagttaggttactaaacaaacctgggtgctgttaaccaacaaggagtccgaaaacaacctaacaggcaactgtctttccctgtccaccgtattccaccaagccttccccgatccactggagaattcagtcatctggttgccagctttcctgatccgcaaggtcagccacatttttccttaggctggtaattgtgataccccaaaaactttagctctgaaaatgtccttgacagatccacacatacacatactgttcccttaaagtgccatttaaacatccaacagaaagaccctttaaggcaccacagaaaatgccttcagagtcccaggttttctattccaaactgttttctcctccagtgtttacttaaagatttaaaatattcttaaactgcagtctttgtgactagtccactatcctaaaataagtgtctttgtaattcatttggtggcaaaaacatgtatctgacctgaaatgacatgaggccagtaagttttttttaaccttattctatttagcataatcagacaataaattttctacagttttaaatatggttgattctgggaagtcactgtaggtattacatgtagtatatgtactcaattactgtctcaaaatctgaaaaacctgaaattacaaagatgtatgggcttcagatattacacattagacttacattcacgctatatcaacttctgtgtgtttttttttttaaattacaaacctttcttctagttacactgctataaatatagatttggggaaaggtacttgcatttagaaactaaactagatcatataattgcttctaaaaacagatacatttttctcccttaataatcaccttaggaaaaaactgctggggcactgagtcgatggttcagcaggaaaaatcatttgcccctaggtgtgggggatctgagttcacatcctcagaacccaagttcggtggtgtgcatctgtaatctcaatatagatcaacaggagtcagagataagagaatcctggaaacctggtttatgaagattcagaaacaagcaaccttgtatcaaataggttcaaagatgaagactgataccagaggttttctcctgagcactacacacgtacacccccactcacacatacacacacatcagacacatgcacacatatttgaaagacaaacaaaacacattggtgttaagaaatcctacaaaataagctctgaaatcccgggggacccccagcaggaactaggactacaatttgacaaattgcttcacagcatttcccaaggtaatcccaaccacagctgcaatttaccaatcagctggagccacgcttttaaatgtgtcatttaaatgtgtcaccgctgtccgtgagttgctgtgctgacttcggataaaagagttgtcttttaacaattctcagttattacaggctttaggcggtttttgagaaacctaccaaatcataacattattccaatactaacactttataaagaggagtgagctattttagttaaattcttagtcatttaagagggcggcttcaagaaactaattgcaagtagaaattttaaaatgtataatattccctaaacttttactattttgtcacgcacagatgcgcgacaagtcataattctttaaatacaagaaagcaaacttacccaaagtatttaaattagtatgtcaaataaaaatgtcaaaatcagaggttaatggtaagcaaccagactctcaaccaccagtacaaacagggagaagggttgatgtcccatgacatcatttggcagtatgtagtttgaaggctgagagcgccttccaaataacccttgcaaatccagctggcaaattacccgccctgctcagcttcgataaccgagttttaagaagaaggaaaaagcccctctccttttagtcacatgcctgtaccacatgaataagataaaagcatcagggatgcatctgcctcccactacccagacagcaacggaaaggtcagaattaggtggaaactcgcctcggagtctgttcaatctgaagggaggagaaatgacagaaaaaggaggggaagaagagggaagcgctgcctcggtgcccccagggcaggttcttcatcccggaggaaagacacggccgccctcctgacatctatgctcaaccaacagatgatgccgaccctggggaccaaggagagagccagacagaccccaggaaacaagcggacgcccagcgtcgggcagcggaccacagtccccgagtgcggaaggcagggctcccgagggttcgcgcttgctctcgaggcgcgccttccccggtgtccccggtgtccccggtgtcccccggccccagcccgccaggccgcccgggcgtcccccgacccccgccgcacctaccgcggctgcgccggccgacacgatgggcggcagcttctcgcgctccggctctttgcccttcttctcctcagaggcggccgcggccagggccggcgacgctccgggcgagggatcccgcgcnnnnnnnnnnnnnnnnnnnnnnnnnnnnnnnnnnnnnnnnnnnnnnnnnnnnnnnnnnnnnnnnnnnnnnnnnnnnnnnnnnnnnnnnnnnnnnnnnnnnnnnnnnnnnnnnnnnnnnnnnnnnnnnnnnnnnnnnnnnnnnnnnnnnnnnnnnnnnnnnnnnnnnnnnnnnnnnnnnnnnnnnnnnnnnnnnnnnnnnnnnnnnnnnnnnnnnnnnnnnnnnnnnnnnnnnnnnnnnnnnnnnnnnnnnnnnnnnnnnnnnnnnnnnnnnnnnnnnnnnnnnnnnnnnnnnnnnnnnnnnnnnnnnnnnnnnnnnnnnnnnnnnnnnnnnnnnnnnnnnnnnnnnnnnnnnnnnnnnnnnnnnnnnnnnnnnnnnnnnnnnnnnnnnnnnnnnnnnnnnnnnnnnnnnnnnnnnnnnnnnnnnnnnnnnnnnnnnnnnnnnnnnnnnnnnnnnnnnnnnnnnnnnnnnnnnnnnnnnnnnnnnnnnnnnnnnnnnnnnnnnnnnnnnnnnnnnnnnnnnnnnnnnnnnnnnnnnnnnnnnnnnnnnnnnnnnnnnnnnnnnnnnnnnnnnnnnnnnnnnnnnnnnnnnnnnnnnnnnnnnnnnnnnnnnnnnnnnnnnnnnnnnnnnnnnnnnnnnnnnnnnnnnnnnnnnnnnnnnnnnnnnnnnnnnnnnnnnnnnnnnnnnnnnnnnnnnnnnnnnnnnnnnnnnnnnnnnnnnnnnnnnnnnnnnnnnnnnnnnnnnnnnnnnnnnnnnnnnnnnnnnnnnnnnnnnnnnnnnnnnnnnnnnnnnnnnnnnnnnnnnnnnnnnnnnnnnnnnnnnnnnnnnnnnnnnnnnnnnnnnnnnnnnnnnnnnnnnnnnnnnnnnnnnnnnnnnnnnnnnnnnnnnnnnnnnnnnnnnnnnnnnnnnnnnnnnnnnnnnnnnnnnnnnnnnnnnnnnnnnnnnnnnnnnnnnnnnnnnnnnnnnnnnnnnnnnnnnnnnnnnnnnnnnnnnnnnnnnnnnnnnnnnnnnnnnnnnnnnnnnnnnnnnnnnnnnnnnnnnnnnnnnnnnnnnnnnnnnnnnnnnnnnnnnnnnnnnnnnnnnnnnnnnnnnnnnnnnnnnnnnnnnnnnnnnnnnnnnnnnnnnnnnnnnnnnnnnnnnnnnnnnnnnnnnnnnnnnnnnnnnnnnnnnnnnnnnnnnnnnnnnnnnnnnnnnnnacacacacacacaggacacacacacacacaggacacacacacacacacacaacacacacacacacacaacacacacacacacacacacacacacacacacacacacacactagggcaggcaggacggccaggccacactttccatttctgagccgcggtccctcatgactgccaaatctgcctctcccttcccgtgcccacgcgccaacattccgctccttccccatctttcgttccctcttatcccttgtccccttccgtttataagttacagatggacatacccaaactgctgagtaatccttaataagcctcgtaagaaattatgggtaagaacgttaaaaacggaattgttttagatcatgctgttaaaatatccccacctccaccgctgaaagacgtagacaatttcctttctcttggcgccccctcctttttccttttatcagtctgctggaatggcagagacacctgctgatggagggaaagggagggaggaagtattcactgtaccacttactaaaaatagagaatttctcgacattgaggtccttggatttttgagacttcgttattttattcatggtgaagtgaattttctaatccaagaatactcagatccaaatacaagaagcaagaatatctctgaaacaaactcaaaggggaggtttggaggatgtcattttatataactcagagccgacagaactgagtatgagttacagttcttcatggcacgagactgtgtttcaagcccagaatttgcagcaagcaataatgtgaccgactaggataatgcctcctgtgctgcttttgaaatgatacattttgctttcatacatggaagactttgtagttttaatatggttgctgtcaccaaacatttccctattaattaacaaaaggtgtggaataagtatcataaaactaattaacaaaaatatctcagtaccgtttatctttagaaccaaatgatgacgtaggcattactttgcaaaatccttttcctttttcttgaacattttgttttcagacctctcttcataaatctcagaaataactcatggggagaaacatctttttcttttagcacaggtcaccgcactgaaagctgacaacaaaaactgtaaagctgaccattttaagtctaattcaaaacgtactgtgctactgtgtctagatggatagactaatactgaaatggtggtgggttatctttcccattgtccttaactaaagtcagtagtttactattaaagtacttggctgagaaacgagttggattgcgtgccttatgcttccactttgcatgtgtgagacgaaattaaaaagtgtgtctgtacatctagtcacactcaatggaacaacatatttagatattggccaaacctggcaagtcagaaatgttcatttctactgcatcagatgagatacgccaactggaagacatccatgggtttattcacccattatattgaaaagataagcgatgtgctaaatttgttttcacttcctactaaatagatgcctctcaatgtaccacctaatgtcgctgtcatacaagccctgggtgggaaatgggaggtagatgtatgtgggcgctcttggtgagctggagtgataacttgggcaagtggggcttgaaggcaactgccactaaagactttctgagtgtgtccagtgtggggtagggtggtggcgttgggagtcatccagagttctggctgttctgtattaacacacacacacacacacacacacacacacacacacacacacacacacacacacacacacacacacgggaaaccagcagagtccagctctaccgacttcctgccaaggttcaggccagttgcctcagtgtattgaaaggacttagaaaatttctagtctaagaattacagaacaagttcacacacgtgctgttcaaatcatgttctttattctttttttttttttttgtgctgccaggttttcagttttaaacatgcacacacaaacaaaggcaattctctgaacgtgaatttctcagggtcaaaagcaggtaagagctgtctcgagtgacactgtcagaatctttctagcccttgggagatgtggctagaaggacgctgggcagtgctaagaggtaaaaaggctgatttatgaggctttaaattctaagacgggagaaggggagttggtgcatgatactacgttcctaggttaaaattctgtatcgataagccaaggtgaaggtaggtgcagggaattaataatagcctgtttagggtagagtgggggtaactgaggttagcactttccccagtcagctgtgggagaattttgaacacccagtctccttatttggaaagacctaagaatcaaacaagcttggatgtaccacccctattttgaggtccagaacgtgatccatatgaaggattcctcttctgaccaaatgcccagccaaatggaagataactgcagggagctggcttttaagtctatctcagggaatgaagcagagattagaatgtggagaccaacgttattgacttcgtgatttaatttctcactggaggtccctcagagtgggggaatggattatgtattcagtaatccattcactgctgagtcttgtgccaaaagagaatgcttatggcttcacacgagacttactgtaagaacagctgttgtacaaaaggtggtgggcccagcatttcgtgactgggtttatctccatcagaatgcattcattctggtggttcaaccttctgctttgtcagctaaaatctcacttcataattcttgtggaaggaagcacatacagaaggtgcttttcagacacacttgtgatggtcaaggacaaactcagagccttggaagaaatggggaacttgctaagtccagatgcaactggacttcatcagtcaggtttcccttctgaattttagaagggttggggaggcaatgaaatggaatttggagatgctatttccaaagaagaatgtcaaagatggaaagtttaacttacagaacacttctaatttaaccacacatagtaataataatgtactaaataatagcaaaattggttctgaaagaacatttaagaatggttcataaccaatcattatgaaatcatttggtctattttaaaatttttcttcagtcttagttttgtttcgtcacaatgatttattgtgtgtgccacattgaattaattagaaggtattaattaggagacaatttgtgtgagtcagttctctcattctattgtgtgggtctctgaggatccagctcagtttgtcaggttgagcagcaggtgccttaatccagtgagccagcccatcagtcttgcaatgtatttgtaaggacagcatctgtttcatattccagttgagtactgccctgaagcagtaaagttggtaaatatatatctttcaaccatgtagacattccttagctgtaatgattgtgacttttggagaaaaaaaatccaatctatttcattacagagaaaagtggaacatgctggctatcaaaatgaagcaaataaccagtaaaggtccaattcaactatacatatgcactaagatcctggtcagtagctttaaaatgtctcccatagctatttctgcttttatacacaaagatacaatgcttcttacatgattttaaaaaaggaaacaaaactattagaagataaagtgggaaatatccttgaattaattggtacaggagaccactgtaccaattacaccagtagcacagacactgaggtcaacaattaataaatgggacctcctgaaactgagaagcttctgtaaggcaaaggacatagtcagcgagacaaaacggcagcccacagactgggaaagatattcaccaaccccacatctgacagagggctgatctccaaaatatacaaagaactcaagaagctagtctccaaaacacaaacaatccaattaaaaagtggggtacagaactaaatagacaattctcaannnnnnnnnnnnnnnnnnnnnnnnnnnnnnnnnnnnnnnnnnnnnnnnnnnnnnnnnnnnnnnnnnnnnnnnnnnnnnnnnnnnnnnnnnnnnnnnnnnnnnnnnnnnnnnnnnnnnnnnnnnnnnnnnnnnnnnnnnnnnnnnnnnnnnnnnnnnnnnnnnnnnnnnnnnnnnnnnnnnnnnnnnnnnnnnnnnnnnnnnnnnnnnnnnnnnnnnnnnnnnnnnnnnnnnnnnnnnnnnnnnnnnnnnnnnnnnnnnnnnnnnnnnnnnnnnnnnnnnnnnnnnnnnnnnnnnnnnnnnnnnnnnnnnnnnnnnnnnnnnnnnnnnnnnnnnnnnnnnnnnnnnnnnnnnnnnnnnnnnnnnnnnnnnnnnnnnnnnnnnnnnnnnnnnnnnnnnnnnnnnnnnnnnnnnnnnnnnnnnnnnnnnnnnnnnnnnnnnnnnnnnnnnnnnnnnnnnnnnnnnnnnnnnnnnnnnnnnnnnnnnnnnnnnnnnnnnnnnnnnnnnnnnnnnnnnnnnnnnnnnnnnnnnnnnnnnnnnnnnnnnnnctcccgagtgctgggattaaaggtatgcgccaccaccgcctggctcgaaaatgtggtacatttactactcagcagaaaaacaaacaaacaaacaaaaaaaaaacaatggaatcttgaaatttgcaggaaaatggatggaactcgaagaaaccattctgagcgaggtaacccaatcataaaaagacaaacatgatatgtactcactcatatgtggattttaaacatagagtaagggattaccagcctacaatccacattcccagagaaacttgtaaacaagaagggcccccaaagagacaaactttgtcccctggagaaggggaaagggtcaagatcccctgagcaaattgagaacatgggaagaggggggagggagctacgagaatgagaagggaagaagaggaaggatgcagaggtcatgagggagcagaaaggttgagtcaggtgtagattagaagaaaggacatgtgataggtagggttttagttggggggagtgggaagggaggaagggagggagagggaactgggattgtcatgtaaatcaatcttgtttgtaactcaaataaaacaaaaaagcaaaaaaagaataaaagcagtagatacacacacacacacacacacacacacacaaaaggaaacaaaagccaaaatataccagatactatattaaatatgtacaactcattctttagacagcttcaaatggcaggtaataatgagagaaaacaggactatgtagttgagtgggtaaggagatagggagggtctggggggagtaggaggatgggaaagactatggtcaaaatatgttgcatgaaaaagtaataaaactgtataaaacactcaccgatggcagtagagagtgggcgaatgatgacttacagatagaggtcagaagacgggcgatggagaggacaaagttgaagagtgacagagctgctttcgtaggagtagaagggttaactctagcaatggctctattcacctgtgtgtgtgtgtggggggggttaaatggatgagctgcataatattggattgtgtttcaaatgtgtgaaactgtttagaaagaatatagtacaacaattcagagcaaagaggacggaatcttaaaatgcgtacactgcagcatagattcaagaccgaggaatggagtgagtggtgatgaccacactttgcacttttaaatatgatgtgccttctcctgactcatcagtgccctcagcatctcaaaccttactcttctcctgccttgggtcttgccttcagtttcttctctactctagttgccaccagaatgacctcttaaaatacatataattctttgccagtcctttgccagtttgtttaaaaacacctcaatagccattcaaagaccttacaataggaattcaacccaccccgctctggcattcacctgaattctttgcaaagaggaattttcagaatgccctaattagagtcatttttttttcctttctgctctcagaacatactgtacatatttactttgcattcacagactacattgcgtctttgttatttgttccacaataaattcatggagaagagggaaagccccatgtcttaattactccttgagtccccacctgcagggagcatactatctggaatgtgctgctgaggtaactcaataagttcagattaataaaacaagatgtttttttgacgtaaaggggctctgatactgttcccaaagaggagttagaaagtactctgcattataggttacacttacatagaggattaggtcctagtattgctgctttttaattttacattttatttattcatttcagaaacaaggtcttgctatacagcccaagctggcccagaactccttatggagaccaacctggtctcaaactttggttgatttccccatctctgcctcccaaaccctggggtagcaggtatgtgccaccctggtatttcttcgtaaacatctcaattttaagagcaaggctatcaaaagaactttccatgatgctgtttccagcatatgtactgtcctatgtggcagccaccaattttgtttcatatctgaatggtcatttgtgactggtggccataatcagagtggctctagggtgttatctcaatgacaaaagagcacctccaacttagtgggccctgtctcaatgacctccactctaaaccttattcttcagagggtaagcaagtcaatcttcatcaaagtaatgaatacagatctaaaggctcggagatcaagcgtaactaagaagctgaattactccttgatgtttggggtgtcttttcagaagcatactggtttcacaggagtttgaatttttgggtaacacaaattacatttgactgcattttatatttgcctaaggctatggagaaatgatctaaactggaaacattaacagcaaaaaaagtgtcaagatggctgtacatgttctcaagttgattttagatggtttctttagacacttctaaaggaatgtgtgtgtatatctatatacatatattgcacatactagtaaagggttctccttgaatatcacatatgtaattctcctaattgtcttacctgtatatattgataacttctaaatcttaaacctaattttacacttgtctttttacttgcaagagataaaacaacaataaaataataaatgacacagcagaagcatcctgtacaggatacacatatttacatttttttgagttaaaaaataaatattctaatgtagctgaagacatccaaacaaatcaatcccagcacttgggaggcagaggctggcagatcaatgtgagtttcaggtcagcctgctctataaagttacacagagaaaccctgtctcaaaaataaaataaaacaaaataaaaaaggcagccattgctattcattcatcctcttgtcaaagatattcaattaaaagtggtttcttctctggcctttcttttagctagtggtgaccatatgatatgattccgttcaacgaaatgtattttagggaaagcatttgccagttttctacctgaaatgaaaatatagtgtttggatatgatactaaactccttaacaggagtctggaacattcctgaaactgtaactgctatagcagcgttgactgcttgtatttggatttcttgttttgctatttgatcaactacttaccttgtttaaatccatgttgaatgcccctcctgtcatttgcagttcaatatattcccattattttcaacatgtgtatgaacacacacacacttcacgaacacatatacaccacacaagggcacacctcacaaatacatatataccacgcatacacacacgagtagtgatatgtaaaatctttgtgtctggctctgagggaaatgtttcagcaaagcctttgccatgtttgggtcaatcagtagaggctgattgttctgagactgtttgcagcttgaagaaatgttgtctgtctggagtatctgcagatttggtgctacgtgagagcttggctgcaccgaccttggtctaaagacactcctggcagacctgcagctcttacatttgattacggctggcataattaaaagggactgagatttgtgtgggttgtctgctttcatgggcagcaagagcaagataactttggtagctggaacttttcccagccctaattaaccttgtatatgtttgagtaaagtaactggagtgagctagctgactggatgtcagtcttttccaagaaggctgaactcctctgctcctttggaaaaatagagttttagcatcctggggatcttctctctgtactgcagcatctatggcagacatcaagcaaaactgatgtacacacatacaaacgcatacattctccacataacctacacatatacacactccacaaacacataggtttttaaatttcatcttaattcacctaaaccattaagttaagttgaattttgactgtatcaaattatgcctctagttgagtgaaatatcttaattttacctatgtcatagtttaagaacagtaataacctttataagccactgaacttcttactacagagtaagaaaagatgcctatggattttagctccgtacattagaaataatgagctgtgaaaattgactttagttctatctcttctaatttttaactaggtataagtctttggtaaaattgttctttgagttaatttccttacacttgaatgggtgttgtgaagaaaaaggagcaaacatacaaaagggctttgtgagctatagtgcattttaataactgtaacttaatgggctctgctgggtaccagagactgtgctcagcactttgttgattggcatctgtattcttctcagaaatccactttaacatgtattgttgtagaataggacttattccattttatagatgagagaactaaggaatcatattgggaatactgtttgttcagagtcagtttttacttgcaagttctactgaagaataatttattgaagtaaggttaacaaataatgaagtatatttaaggtatataatgtgatgttttcacacacacacacacacacacacacacacacacacacacacacacacacaccatatgctgggaagagacaccatgaccatggcaagtcttataaaggaacacagttaattaagactagcttacagtttatgtccattatcatcatggtgggaagcatggtaacatgtaggcaaacatggtgctggagaaggagctgagcgttctacaccttgttctgcaggcagcaggaagagaccgccacactggtcatagtttgatcatatgaaatctcaaagcctgcctccacagtgacacacttactccaacaaggtcacatcctaatagtgccacacatcctaatagtgccactccctagggttgaacattcaaacacatgagtctatggggaccattcctattcaaaccatcacaggggcattataaatttaaacatatacacaccaaataaaggcatcacagatttaacccgacacaataatagtgggtgacttcattaactcactctcactaaagccagattattctgacaaacattaacaaagaaatactaactcaatgatgttgttgctcatattgacccaataaacatctacagaatagtctacttagacactacagaatgcatattcttttcagcagtgcacagaactgttcttaaatcatataataagatataaagcatgtgtcaacaaatatacaaagttgggacactttcttatattatttctgaccagaacggaataaaagtagaaatctgcagcaagaaaaactccagaacacatagaaactaatgatgattaaatagcacacttcagaatgatgaacgggtcatccatcaaataaagcaggaaggaaattttaaaaatttctgggaatcaaatgataatgaaaatacaacaccccaaatgtatggattcaattctcttgagagggaagcttacattgaaaaaaatcagatcttaaataaataataaagacttttagggccttggaaaaacaaaaccaaatcacaaccctaaaccagtagatagaaagaattaaaataaagggtgctatcaaagaaatggaaatttataatgcaaagaatcaatgaaaacaaagagtttgtttattgaacagacaaacaagataaacttttacccaaagtaagcaaaaggagagatagaaataaaacacaaattaatgacattagagatgaaaagagacattacaacaaaataccatgggatatgtttaaaaaatttatatttactaaatctagaaatggatgaattttctaccaaaattcaacaaaagtaagataaattaattaagcaaatatatagcaggcaatgtgaagtaataattaaaacatctcccaaccaaaagatgtctaggctcagatggagtcaacactaaattctcgaggacgtttaaagaactttgggctggagagatggctcggtggccagggtatgttctactcctacagaggccttgggtttggttcccagcactgatagcaggggtcttacaattgccaataactccagctccaggtaatctgacactttcttcagcccccccccacacacaagcacgcacacacgcacacttaaaaaatgaagaactaacagcagtccttctcaaatgattctatgaaacaggaaaatacagaaattttttataaagccagcattccttgatacctaaatcagataaagaaacaactaaaaaaaaataaataccatacatcaatctccctgatgatcatagctgtaaaagttctctataaaatatatgcaagccaaatacaagaacacatcaaaaagatcattcaccatgatcaaggtgtcatcattttggaaatccaggaatggtttagcatacacatatgaataaatgtagtacactgcacaggaactaagtactgaaataacacagttgtctcagtaggtgcaggaaagtcttttttttaacacaatctagtatttcctcagaataaaagccctgaagagactaggaatagaaggaacaaatgtcaacacaatgaaggctgtatatgacaaacctctatgtagtgagtctttctctgtcccaccagcagctcccaaataatgacacaaagacttcttattaattatgaaagctcagaattagcttaggcttgcttctaactagctcttataacttagatgaacccatttctattaatctatgtgctacttcatgactcatggcttttcctctgctcctacatgccctgctttctctgtgaccagctggtgacttcttcacagctccatcctctcttcctctccccctgtctctgcttggaagccccacctatctctcctgcctagttattgcctgttcagattttttattacaccaatcacagcaacacatctccacacagtgcataaatattctgcaacatccataaccaacattatactagggggaatctcagtatttccactaaaatggggaacaagataagattttctactctgtccactcttactcaacataggttttgaagtcttagatggaacaacaagacaaggaaacgaaagggatagacaggaaagaagccaaagtatccttacttgcagataatatgattctataaataagataccctaaacatttctctagagaactcttaaacctgatacacattttaaacaaagtggcaggatacaaaatccatatcttaaaatcagtaaccttccaaacactcataacaagtgtggtaagaaagaatcaggaaaatagttccattcacagctgtacaaagagagaaaggaaggaataaagaaagagagagaaagaaatatgggtggatagatgatagatagatagatagatagatagatagatagatagatcttggaattaacctaaccaaagaagatctctacaatgaaaatgtcaaaatattgaagaaagaaataagagaaaacactagaagatagaaaagccttccatgttcatggattatttcatttaacatgattttcagttccacccatttccctgcaattgacaaactttcattcttcttcatagctaaacaaaatcccaccctatatataccataatttttttatctatttatcttttgatggaatctaggctgattccaatccttgatgttgtgaattgtgaaaataaacacagatgcttcacatcatatcctttgagaatgtgggtgtactgcccatgtggttgaagagtctgaaaaggatagtgagcattgtagagtcttccccaggctgttttctccccatctcacataccctcctgccagattctccctggattttagggaaagatatcaccatgtctcatgttaaatgtgggcatgctactcatggtcagtcagtgaaagttcagcttttatccacaatgattagttcagtgatggggacttgaccaaataagaactagtcagtatgataactttggggggggggtgggcccaggaatccttatttgaaattagctgttataggtgactctggattaaatggcagtgggcctagggccacatattcagagagattgtattttcagagggcaaaggtacttgcttcattaacttagttctccaaacttttaagtaaaatatgtaggttaacaagagtttaactgaatcacatttaatgaattgtattttgacagtttaagtcatttgtctataatacatctgccaaagataaatgctcttgaaacttaaaaatcatacattttctgccttgcagtcataagtgatttcactgcagcaacaatgacaccaattttatgccttttatatagcaaagtagagaaaatgggtcttaagtagttattacccagtaaaaatggagctgtcaccccaaatagtcaacagtcagggcagagaacttaaacaaaaccagcagctcctgtattcttcctctacacaggagtaaaaaggactgcataaaattgggaggcattgttgtgattttcagacatcgatcaaacatatctaattatattcggctgatgaatttgtgaaatgccaactgaacatagacagaagggccagcgagatgggtaaaggtacctgctataaagcctgaagagttgagttgaaccttcagtatgcacagggtagaagaagagaacctactcttgcttgtcaatacgtgtctttgtgtgcatgcatggcatatccacacttggttttgtgggtatgtgcaactctgaatgagtgtggaggctggcagagggcatcagtgttctccatcactctcttactagtcttttgagatagggtctctctttgaacttggtgcttacgttttcttggctagaatgatcctcctgtctgtgcccacaacagagcttgggttataggcatgcatcagatgcctagcttgttgcatgggtgctagagtccaaaccccagcctcatgattgcccagcaggtgctattgaccgctgacccatctttccaaccccagcaacaacttttcctagggactaatggacctctttattcctgggctgcccgtggaaggtacttcttgattgccggggggttggtgggacgacagcatgtgggcttcccggcctcagttaattctttcaggaaataccctcatagacttacccagaggcatgtctcttagtttatttagatccaatcattaacctcacaaagatgcccagtgtacctgttattaacattttgcctacttaagattgtatttggggttggagagatggttcaatggttaagaacactggctgctcttttataggacctaggttcgatttccagtgcccacatggcagctcacaaatgtctgcaactccagtctcaggagatcccacacccccttctggtgtcctcaggcaccaggcctgcgtctagtgcacagacatacatgcagacaaaacaccatacccacatgaataaaaataaataatattttaaaagattatatcttctaaggctaagacatgaaagagagggataaaaaccaatgttcaaatagtttctgtggcatttcaacatgaacttttaaaaggaccttaatccactaaataaatgaatctaatatgattctaaacctttatctatggcagggatctagaatcttcctgtgtgggcacaaaggtctcaaatgactgattccttgcaacataaatgtcactggtcatcaaggtaggcggagtttctaaacatgccacgccttcttagtagacccttctactaagggtagtagtggagctccccttcctgtagctgtattacagtttggtgcaatagacttagggtggagaaaatgccggggcaatcctcacctaaacacatgggctatggaaactggaaactggctggcagaaatcagagagactcgcagtatgacaaagtatgggccgttgctgccttggtgatggaagcaggggcacacaaggctaaatgtaagcagccttttaaagagctgaggaaggtcactggatgcactcagtaaacaaggaccttggccttactattgctaggaattgcattctgccaacagagcccagatagctgactccctgacttgagccttatgagagaatccaggcagaaccacctcctaaccaatagaattgtgaactcatacacaattgctgtttgaagctgtcaaattagtcccatttttatatgtgtctgtgaatctgtgagtaatgtgttgggggagaagggagagaaagagaagagaagagaagagagagagagagagagagagagagagagagagagagagagagggcacaacactgggtatgtgtgaccatgcccagatttctatgtgggcattgagatttggatttatggttgtgcagccagtactcttacccacggaactatctcctcagtcttgtgctaattttgacaccacaatagaaaactaacatagtcaagaaaattgtgaacagaatatttaaaggggacctgagaacctgcatctacagggtctgtaaacaaagtggcggggaagcagatactggaaatggtatctacaagtgtgtgtgtgtgtgtgtgtgtgtgtgtgtgtgtgtgtgtgtgtatgtgtggtgtgtgtgtgtgtgtgtgtgtgtgtgtgtgtatgtgtgatgtcttgcctacatgtatgtctgtgcactacttccatgccttgtgcccaagaaggccaaaagaggatgtcagatcctctggaactggagttacagatggttgtgaactgctgtgtgggttctgggaatcaaacgtgggttctctggaagagcggccagtgcttgtaatcactgagccctctctccaggccttattccaaaactttcaaagtcctcctttagggcacacaagtattgccaagtgctgttgcacaggctcatggaatcctgacatagtgtatgtgtctttgttttcatctttgctggaatgccaacaccatttgggcagcaaccatcactccctgtacatcccatatcaatgccaagggcagatcttgattcccagtaggtacttaatgaacatttatagaataaacaaataaattattagggctagaattatatcagccagcattataacaacactcatctgctggcaattgtttatgcttgaattcattagaaagattataataagcttctttgaatgtgcaaatagagttaaattggccaaaacattcagactatagatccagggtatggcaaggcaagcatttagtactaacactggggaggcagaggcaggtagatctctgtgtgtcccaggccgtcctggtctacatagtgagtaccagagtcaacaaccatggctacctagagaaaccatgtctcaaaaaaaaaaaaaaaaaaaaaaaaagacatgaagaaagaccaaaaaagacttttgagcaatataaaatcattaaaaaatatgtttttgtttatcctttctgaaaatacagatgaagggactggagggtagtaaggttgaataataagtatgcaactgaattaagttatgacgttagttgtaaatgtttatcaaatttttcaatcatatgagaatccatccattgtttagaagtgatgagtccagccggctaaatcagatgatgtaaaaacagtaaaaacacaaacaaaaaccagacaggcttcaaattcatagtagctagaaaataaattcaattccaacctattccgtgaagaaagggactattaggttttaccaaaacttcactctttgggttataaatatgaacaaactccctgcaggaattccaaccttggaggggcactaagccaagtacaacacaaagctgagggaaaggtcttactggaagcaggctggcctagaactcacagagatccaccttcctctgcctcctgggattaaaggcgtgcaccaccaccacccaggtctgttttgctttcttgtaaggttgagcagaggtctctgggcaaaggctttgtatagaagtctcatctggcaatggacgtagagacgacccaccggaaacttacccctagtcttattaatggttctgaatccacaccttggaaataaactgtctctctctctgcctctctgcctctctgcctctctctctgctctctctctctctctctctctctctctctctctctctctctctctctctctctctctctctctctctctctctctctctcgtcttagggattgaactcacgtcctatgtgtggtaagcatatgacattcgtccactgagatctacctcaagacctgcctcggatataaatacttagaaccttcctacacccaaagttgcgcttcattactactttcccaggactcacggatgcttggtcccgtgtatgccagtttttcataagcacggtgaagaatcttgtggaggactgaacatttagaaagcgttaaagacagacgactgatgttatcagttagctgcttccgtgtgagggggatacagaagagcccagtcaactggtaacttctccccagggcagggcattaatccctacggtttctgatgctctgacaagcctctatttgaaatcttcttttttcactgtgggaagtcttttaaaatatagaaccgatgaaaacgtatggtgaaatacgttttttaaaagctgtttttgcgatttccctagaacccattagtgctgtataagtgcttttgattatattgccctctagtggcagcttgaggttataggagcaaaactcgattccctttcggtaggttgttctatgttacatttgagcatttattgaatgattctcactgaagtgtcgctaaagaagctcagatgatgaaagtcttcttcatttcttggtctaacaaaaatcttccttttgtcatagcacagcgtgagaaaaactaaagcagtaggtacaaagacagtggagtactgtgacaagaggactcagctcccagaatcctgggaggacttctaataaaaaaaaatcactttaaaagatttactggccattttgtggacgccagggagcagagagcatctgcccgagcagctcccgagcagcgggtgggcctgtcggagtgttgagatttgagcttcggtgtttgaacccagagtctcgaaatgcatcgtgattcctgtccattagattgtaaggtgtatgtaggtaatcttggaaacaatgggaacaagactgaactagagcatgcttttggctattatggaccacttcgaagtgtgtgggttgctcggaaccctccaggctttgctttcgttgaatttgaggatccccgagatgccgctgatgctgtccgggagctggatggaagaacactgtgtggctgcccagtgagagtggaactgtcaaatggtgaaaaaagaagtcgaaatcatggcccacctccttcttggggtcgacgccctcgagatgattaccgtaggaggagtcctccacctcggcgaagatctccaagaaggagaagctttctagagataggagaagagaaaggtctctgtctcatgaaagaaaccacaagccatctcgatccttctctaggtctcgtagccgatctaggtcaaatgaaaggaagtagaagaccagtttgctaaagaagtggcgtacaggaaataacttcatgtgacaggagtatgtacaggaaattcaagttttgtttgagacttcataatcttggtgcattttaaagatgttttagctgtccaaatttgctttgaactttagtttttcatggactgaaataaacctagatcctgcccagtttaaagtgtgatgtgctaatgctatagaaaccactggcagtttgtctagaagctgggatacggtgtggagctgtgggtacaatggcaggcagtctttgagagctgttagtgaacaccggctaacaggtaggaactgtaccctgaaggctttcagacgttccttactgattgctatatatggacgcaaagctgtaacattctttatttggagatggaagactttaagttaccagggtacattgtagagctgaacctttgagttactgtgcaagattttttttttcatgctgtcatttgtaatatgtttgtgagaatccttgggattaaagttttggttacaaattgttgttttttaaaaaagatttattttgttgcttatttagtgtgtgtgtgtgtgtgtgtgtgtgtgtgtgtgtgtgtgtgtgtgtgtgtgtcctcagaaaccagaaaaggatgccagatctcttggagttggggttacaggcagctgttggccacccagcctcggtgcaggcaactgaacccaggccttcttcagaaacagcaaatgtgctgtctactgagacatctctccactcttccagcatgttatatttgaaaagcactttgtaaaaaacacatggtagttttctaagggtgcatgtgagtgcatgtatgcacatgtttgtgtgttgttctaggatgaaggagcatcttgaggaagggacactagtcagcaaaatgcatagtgcatcttacagtcagctgtctttcatgtgattttcacaatatgccttggccagtgttgtcatcctgattgcccattatacccacaaaataaaagccatgtgcagtatacctacaaaataaaagccatgtgcagtatgctcacaaaatataaactgtgtgcatattagagaggctgagacagacagataaaatagactcaccatcagccaattgctctgtgatgctggccagggtactggtctctctgacctccagttttttcgtatgtgaaaaagagaattaatgctcatctctagaattgctggagggattgaaagaatatgaacaaaagttggggacagacaaggtaatccttaaagattaatacacccctcaatctttgaaacaagctttagctacaccacactgcctcttatggcaaaacaaccattacacgcattccattttgcccaaacaaccttacatctatgatgggctttagcatctgagactttacagcctatgcctcacttcctcagcttctcaggcaacccagggcatcttaacatctcctcccaccattgactgaggctctcccccatgtcaagcagagccctgggacgaagcactcagctgctgccctctgctcaggtgggaagaggcaagcgatgctaccgggcacggctcaaataactaacgccctgatccagacaagaggagggctgtacaagcacaggatagatggggagggtgaaggggatgcacttttcccagaagaggaggggaattactgatgggaaaatactaagtgtgcatttgtgatgaaatgggtttccaaggtcatcatgtcacacagctgttctttcctttgtactcagcctgaggtaaatgtgctctgtggccctgggaactggagtgtctttaagacattgcctctctaaagtaacttcgctatgttccagctgaggacagagtactatcattagttgaatcaggcgtgtgatccagaggaggaatgatggttggtggaggtgactcagccacacggttcatgtgcacacgtgtttcctgtagtgctgttttccttaaagaagtgaaaagaaatgagtacattttctagatcacaaacctccttctcaattatcatcctcattgtatgtgtatttgcatggccacagcacccacgcggaagtaagagggcaactgtatggagtttgttctctccttccacctttatgtggagtcttgggtttgcataactattgcctttgtctgccgggccatctcattggcttcaaacctgctatccatttattcattttggagcaatcttactgtgtagccctgactggccttgaacttgctatgtagacccggttggcctcaaagtcacagagatctgcctgcttctgcctcactgggtctacagtgtgagcacacagccaaccaaaaaccagctttttaaagtgggaaacttagtattttgctttctgctaaacaactttaggcacactatgatgttttagctattttagccatttattcagtgcaagccagctctgcagcagatgtgggggtcttccttgttcttagaagaaaatgaagctccaaatatcagtaggcaattgtgagggaaagaaaggacacacacagcaagcagcatgtgtggcttccaggcaggatgcagtggggatgtgctgagaggtgcgcacagatttctcctccccagatgggcagggatgaattattcaacattgatcactggcatgaacaatgaaacaactgcttttttagtcttctccagggtgtgtatgaatatttggtgggtaggacttttcctccaaggataattttagccctgaaaactcatcaaattatttcaaatcctggcaagtttcaaaatatgagtgggtgacttaggaaaggtctattctcaagaagtaacaatggtgtcagcacaatccgagagatttggaaaagaacgtgaacacacacacacacacacacacacacacacacacacacacactgaaccacttttctctctctctcccctccctctgctctctgggtctttccctcccattcttttgcttcccagaaattaaaatggatttaacacattgagaggttttttttggggggggtatttcttttcaaagccaaggaataagtttacattggcatcagagccatacagttctaacccatagaatagagggcagaatttaggattaaaaaaataacatagggaaccagattgttgttgacaatgaaactgctatttctccttgccaattatttcccccccaccccaccccacgagttttcttctcacaaaacaacataatccctggggctagtattgaatacctaccagttatcctgtgtggttttagaatgtacatttgcagagacaataaacaaacaaaacagacagacgcgcgcgcgcacacgcaaacaccctaaaggaataggtaactacacatttgcatgcatagttcctcatattctccctcctgcctcctaggttttaaaaggaaacaaaagataaaattttcaacaaatggcctctttctaaaggtggactgccactgacctcactgagagtaaataggcttgaagtgattactgaggttctctgtgtgttacagtctgatgttaagatttggccattttcatgacgaaggttaatccatggagtcagacatgttcttgctttacaatactgttaaaattctttttataagatgcagtaataattccttagcatttgtcatttgggtccctctctagcgaccccagcagaaagtcctcttttccttgttgggcaccttccctgtgacagtgaaggtggtcagagccactggggaccatttgcctcctggctcatccctttaaaaattacccatttttaaattacccagttttcccacgtctgtagtttattaagctcctctcagtggttccacttgtcattgcctgtgtttgtacctgagaggtggagtgtggattaaggaaatggataaataggagacaagagctacatcaaagggtatgtgccatcacagccagatgtgcccaatgtggggcagcaacacccactcttgccaggagacaggctgtctatttttccagtatctcaggtaacttgatttcagctccttaggcttcttttcctcagcctcaatgttctgtttctttatgtctctgaggaagagatacacttcacagtgctaagtgcacagtaggcaggagcttgccgtagctgagtacatctgactcagtgccagggccttggcaagaccagacaacctgcttctccttttgagacaacaagcaagcacagagattgtaactgatgtctgtatacaactctcaccctaaaactgctgcagaatgaggagtgagactcatagtctaggtcatgcgccagggaagcatagagtaaaagaagcatgaaggggtaagcagagagcaggaaagggacatctaagaccccagagtgaccaaggtacagggggtggcttgcagagcactggtcagtttctgtgagtctgggcttccaaactaagagttgggatgctccctgaaccttgttagtaagctcgagaattaccttgtgctagttcaaatggataactgatttttggtatctttctgttttatttcattatagacaaaggtttctcagccttggtactattgcctttggagcaagataattcctggttgaggagagatggcctgtgctctgtaggatagttagcagcattcttttgctttccccactagatatcagtatcttccacagtgtcctccagtcctaaagccctgacccaggggaatggcagacacagggaactgccctgcctgaggtagcaagggaccttagagattaagtggttaggggagtgaagtgttgggactaaggtctgcagaacaggtggcataccctaggggctagctagagtctggactggttgttttggcatttttttttttacatatgtttattttcctccctaatcaaaattctgattttggcccttctgtctctccatttccctggaatctagtagaagatacaaggctaaggatggatgtagcatggattctaattggtcttaataaaaacttggagtcagctatcggagtgaaagctgaaggatcagggaagcagagcggacagccactagagttcttacctctcctaatgctcagaccaaaggggccatcctgccctcagactgcatcctcagactgctgctgtctctatcaatcctcagattgcctgagttcctgtctcctcctccttagaattcctctctcttctcagccatatcactcctgtttctacctccctagtgctgggattaaaggtgtgtgatcccaagtgctgggatcacctttgtgtgaactctgtttctcttttagacagattcaatctgatgtggcccagggtggccttgaactcacagagatccatctgcggctgtcttccaagtactgggattaaaggtgtgtgccaccactgcctggcctctttggctaatgagtggcttagctctgtactctggtctacaggcaagctttatttgttatagcatagacaaaatatcaccagagatggagaaaaggtgggcggggatagagggggtggaggcatggaaataaaatttcgtgtgccttggatactcaagccgtcatactggagagtttgagatggccaaaatcacatgtggacagtagggaatcggctctggaaattgtgaaatgaaagcagaacatggaggctctcctgctctctgtagcaactgaccagacaaacatcatccaaggatctctgttgtgggatttctcaaaatagatccccacctttctctgtcataacctgtgcatcactatccctgcctattgacccgtgctatcagggtagactgaacacggatggcaaagagcaaacactttgacatctctgcccggagagccgacagccttcccagaatagcaaagtgtgctcataagacaaacatcacacagaagtatagcaagttctaaagtgaatacaagtaaggatcaagtaaaaggagagtgagagagcaaggtaagtatatatttgcttaggcaattgtggcaggctcacttctgatcttacgcggaatattggcactcatggagtttttgtctcaattaagcacccgcattatatacatgggaaagagggaccagataggttaagtagacagtggacctgtttgcagattataggtaacaaatatacaagacgagagagtcacccccatccaatgaccttaaacgcacagtcaacttgtgtatacggaacaaccttgggcctaaaatgatgaaaatactgcattagtaatgattattttcagactttcttttcttcttgtcactcttcctgaaacctaactgcagggcaggtgagaaagaaaatgtgagcgcgcataggttggagatctgcagatggtcctgggacactggaccaagaaggacctgagcacagatggagtctgagatcaagttcgttaagctatagaaacctgagaactgtggcatataaaatatgccatacatttatataagagatatgtggcatacagaaatctctgacagtggcagtggggctctgagccagcaagtgagaccatggaagtgtttcacagagatggatctagcaggggtgagggaaaacacaacacagcaatcagactttccagtagctgggatgtgagtgataatgaaggcgagaacaatgatggtggcagcagaaattggcagggcataatgacagcggaaaaaaggagccgcttaagtggtgggttactaaagaaaaggggctgtttggggctgcccctcctctaatgaggtaaatagctcaaagggtaactgccagtcaccgctgctgctaagagctcaagattgctcgaggaggaagattggtctaatctagtttagcttttcttcccttcttttccttgaaccctgtgaatgaagttcaggcgattcacaggggtatcgccttggaaagccagctggctgccaagacaggcacagggtgacattcactgctgtgacttaaccgagaaggatctggcgtctgtcctgttggcaggatggggttttgtttctctccccctttcctttccctggggcatggcacacacccaagtcccctctggtatcaggcaggcagtaagcaagggtaagagaaaggggtcttttgtcaagccagacccttcatccaccagcagggactagaaactcctggaaattcttctgttccaagcaaggaaagaaataaagaaaagcagatggaatgagtgattgacaaggcagaccggaaactaaggaggggaagggctgagatcagagatctaggagcagagcaattaaaacactaagaggtggaaaggaacaaaaaaccttcctaagaggggaggggctcccaggaccctgggaaagaggtgacagtgtgggtggccttgggagttgagaacaaagggcaggcgggggtggagccctgggaaggagagctgcagttgggattacagcagatggtttgagcaggaagttactgttcagaacattcttctggacttgtggttgcatgagattgatcagcttggctttgtctgcacccagagagaagttgtgccttccaggagaggcacgcagtagccaaagccacaggaatgaaggatgagtgcaaggccaaggtacgagactcataacgaaaaaaacagtggtccatggtgttacctcccccccttgctggccagccaggagggaagtctaagatggcccaagggtgcagatgagctcaagactggaacagaagtagcttgctacataattcaccatgtacaggcagcctacacaaagatacttcccctatgtacagtgattaaacgactccagcagcttttacagcttcaaatttcctccttttatttatctaggccactgaaactacctgcatccaaagtcactggggaactgaagtgtccagatagctaggtgttttccaggctttccagaatcaatgtctcaagagatgtcccggagtcgggaatttcaatgaactgcgcacagaatttgcagagcctaaatacagttgcatgctaaccctttggtctcttttcagtctttgagtgcaggacatttatttgattaggtttgctcaactgcatttatgatctgaggtctacaaaaccaattattcatctgtttccccctttgggaacttgtgcctagtaaatcgtcaatataaggggggaaacgggaatctaagggttgggtgttggttttagttaagactctctggtcagtgtaaggattcagggattctgctgacctgcccatgtcacctagcagaatgtattcaggcagtaccctggtcagtccagggttccatgactactagtctatatgaaggtgcaaaggaccctgatgggggagtccttctgtgtatatgtttgtcttattggttgataaataaagcactgttggacaatagggaagcaagataggtggggctaggagtcaaggaggattctgggaaatgtagtagagagagcaaccgccatgtgatcaccggaaagagaggacacacacagccttccttgataagtccttacaaaatatatagattagtagttatggttgataattaagactgagctagcatgtaagaaatcctagtcattggccagcagcattgtaattaagataagactctgtgtgttattttgggtgcccacgtggtagcggggctttggtggctggcagaaagatttatcattacaggacccctttaaaagaaagaccctgcccacttctctctctctctctctctctctctctctctctctctctctctctccctccttcccaccctcctcgcgcctttcttccctgctgttcctgtggggcagataggacttttcctgacttcatcttctcttctgtcctttctctgtctctgtgtctctacctcttttctcattccttcccccttttccctttctaataaaacttctcattaagctctgtctgcctgacatgtttgtccccctccttagtcaccctcgcctgccatggaatccgccaaggtcccccatgtgcattattcataacagtctgtctgactgacagcaggacctccaagctctctgttacaactctgacctagagcttgcacaggcctggagctggagaatgggagagaggccctgcttctgcttatggagtttcttcatggaaatggaggtagggttgggtttagaggaataaaagataagaacttggataattcttgaacatggtcagttacttgcttttctgtaactctgataaaacaccaagcgggaaccaacttgaaaaattagtttattttggcttatagtaccagaagtccattgtggcagggagaggcatgggagcaagtagtaggcctggcagcaggatcaggaagctgtgaggtcacaccatcatccacattccagaagcagaaggagtggactgcaagggaggtgagactttaaactctcagatcccgcccttagcagtgtacttcctccatcaaggctgtatcacttcctgaaacagcaacaacaactggggaccaactgttcaaatacccgagcctgtaaaggacatttctctttcaagccaccacacacaataaccctgtttggcaggaaattttgacccctttgagggttgcatatcctatttcctgtatatcagatatttacattacattgctaacagccgtgaatttacagttatgaaatagcaagaaaatagttttatggttgggggtcatcacagcatgaggtttcttggcatttcgaaggctgagaaccacttagaaagccttagaagaagacatggctgatgtcagtctgagaaaatcagggtggccacaggggtctcttccaggtggcataggagcagattttgggcatgtggcacaagagatgaaatagaagagcatgaaaaacagctgagccaagggatatgtgacctcagatgatgctgggatgtggatggggcacattctaatgcatccttcacgatgccacactaagaactgagagctttatcctgctgacaagggtttccaaagtggtttctgcatatctcccattggggatatacaaggtaagctactgagtgttttaaaagattattaatcacattcattaacaaaaacaactattgctgtgtttatggtgtctctttaatcttaaaaaattaaaataaatggaacactttcttgtagctggggagttgaaatattctcctcaggctgatgtagttagacagttggtctccagttggtagcactgagtggcctatgtgctttgctaggtctgtaggatggaaacagctccacaatgctttcctcactactctaagaagtttccctaagcatgtatggacctcaatgtaggctaaactaggattttcgacttcaatgatgacaataatttcaggacttactggtacagtgaagcaaagttggagatttcattgaagctactattatacaggcttgagcatgagttaagagaaagaaaggcactcagaagaaaataagacacacccaagtggtaggatgtgttttccaagggagaaaagacatatccaaatgggtggttgtgggctcctcaagggagaataagcacttaattgtcttggccttaactatatatacaattttgatggctctcaagctgtgtttccaaaggttgttatgaaatctccctgccctttttcttttctctcttttgaaaagtgaggtggctctgaagatgccttgggttaaattatattctgatcaggtaaagccaggatccagcaggatcacaccgggacttagtacatgtcttttctttgtaaatggggtctctggtgagactcctagaaaattgcttgtttgtggctgagaagagagagaaactggccttaagctgtagtaaagctgctgcccactgtgccttctcggccactgtgactgtgtctggactgtgtcttagttaaggttaccattgctatgacaaaacaccataacctgtagacagaattttctttgggccaccaactcacagaaaatgacacagagacttattactaattatgaaagcttggccgattggttaagcttgtttttaagcagttcttataatgtaaaataacccatttctattcatctatgtggtgccatgtacttgtagcttttaactctcatcctgcatgtcttgcttcctctgcatccagctagctactcacatctctttcccagtgttctctctgccctgaaaatcctacctagttattggctgttcagtcttttattaaaacaatcagcctgatgcatattcacagtgtacaaaaaggttgttccacaacaatgaccaaagcaacttgggaaggaaagggtttatttggcttacacttccaaattgtagtccatctctgaaggaagtcaggacagtaacttaaacagggcaggaaccataggcagaagctcatgcagaggccgtgggggcagggtgcttcttattggcttgttccccatggcttgcttagcctgctttcttacagaaccaaggaccagcagcccaaggatggcaccatccacaataggatggaccctcccccatcctatttcttaatcactaattaagaaaatgccttacagctggatcttttggaggcattttctcaattaaggtttcctcctttcagatggccaacttgtgtcaagttgacataggatcagccagcacagactgtatgtatctcctgagattgtgatcctgaacaaacctcccctcccttaggtcacatctgttgagtattttgtcacaatgatgacaaaagtaactaatagagattttaaaactacaatatacaggttgaccttgactttcccatttaacctatgtatcataatgtgtcacatatagactgtgaactatcctgagagttagattgagatggaactcagtaacccacacaggctatgcatagtgtctttagcctttatttacttttaccatgtaacacattgcctggaaattttatattgaataaataggcctaaaaattaactttgcaaagtgggcatatggcttaagatagtattccaaagaaattacagtttgcttaaaaacctttctttctttctttctttctttcttttttctttctttttgttttttttttcttttttgcaaaatggtcttgggtacagatcactcacagaaatggcttttaaccatatgtagaaatactcaatctaacagcggcaagttcaaattaacactataaaggtaagattcctcacctatcagatttgcaaaaaagccagaaatttgactcaacattctttcctagttattttttatagctgtaataaaggtcaaaagcaatttggagaataaaggctttatttggcttatatgtccctatcataggtcattgttgagggaagccaaggcaggaacccaagcagggtaggagctcagaggcaagaattgaagcagaggtatggaggaatgctgcttactggcttgctggacatggcctgcttgtcttgctttcttctactactcaggtccacgtagccagaggtggcactgcccccagtgggctggaccctcccaacccaatcatttaccaagaacatgccctccagacttgctcacaggtaatctgatgggaacattgagagtcttctccccagatcctctagcttgggtccagttatcaagaaagctaactaaccaggacaacagggttctaaataagccagcacgtctatattccagagggaatgctaaatggtgccatccctcagaaaagatttaggatagctagctagcagagtcacatagtccttattttgtcaaagcagaaaggaaggcagatactgaagacaacgggaagtcatgtcacaagaacgcaggagccaatgcgaataggttacctgttacgataaatctttctgccaaatgccgcctgagccccaccgacacgtgtgagctttatgccagccacctgcccgaattaggcccaaatgaatacacagaaacttgtattaggttcaaagctgcttggccaatgactaggacttctcatctgctaactcagtcttaactatcataaacctatatattttataagacttatcttatcggacaccttattggcgtccctccttgatgggatcatatcttgccgctggagcaggagcggaggggtaaaagagggcccttcctgtttctccttcgcttaaatatgagtctccttgctatgtcccttcctgtctggatcagcacttctctactacatttcccagaatcctctttgacttctagtccgtctaactttctgtctcattggccaaacagtattttattcaacaatcaataagataaacatgactccgtattggtaatttcccactatagttaccactggccaggtaggggacaaattgagcatcagtaagaatcacaaattcagagactggaacatattaaataaatccatgaatttataaggatacaaaagatcttttattccagtccttcatcaaagtggaaataatgataataattagaaatggcacaggtaggggaagatatctacattaccaagatgatctctgagatatatatttaaggatgatatctgtctatctatctatctatctatctatctatctatccatctatagtatgagatgttgatggttaaaaacatacttacaattataaaactagctgtccagaaatttctggtcacaatggagcaacacggactggtctctaactcttggattcaagtgatttaaagacacacaagatataattatgaatgcatattacttataagtagaaaaatacagacatttcactattttattctggcaaggatgaataattataatcatggagatggtcattttggctgataaagactaattagaatgttttgaatagacacagatattttagtttttgatttggctcttagacaattgcttatgaagcagtggggaacctgggatgagattaaactgttgcttatgagctttcaaaatttgacacgattcaagaatctgtccatctatacattgtgtggctctggagactaggcttaaacaaaaagcacatcatacctgggcaatcatctttaaacctttgaaccagccatactttctaagagcttagaaatgatcaagtgcacattttatggctttggaaactgaggcccagtgaaatgaatttatttgtctaaaatcgctcagctaactgaattgtggttgtcagacaactggttacttgctagtctgtgatgacattaccatgcctttctagtagcaagatcactcttagtcgtgacatcctcaaggctccctgtccactgtgcagaatctttgtcactgtatgacagcatagactataaccccagacaagcccatggcttcttcagttttgaatatgcttaacgaaagctaatgctgttctttgtctgcattgataaggacatttacttggtcttaaagaattaaataaacatggtatttgaataggaaagataaaactctggcaatcccttctagaaagggttgttgatatatcgatgacattggcatttctccccagatacacatttgaaatcccccgtaatcagcagaagagacatggaacctcccaatttctccatgagtacagctgaactgacctgctaccacaggaagcgcctttctggctgtctgcttcataaactccatgagcctgttcttcccccaacgtctccaaatggatgcttcccggtccctgtcttgccacgtgttcctcatccacattgaacttatttctacagagtagcattattctcctgcttaaaatagggatgtctgaaacattgtcccctggagaaggggaaagggtcatgatcccctgagcaaattgagaccatgggaagaggggggagggagctatgagaatgagaagggaagaagaggaaggatgcagaggttatgagggagcagaaaggttgagtcatgggaagaatagaagaaaggatatgtgataggtagggttttagttggggggggttggtaggggaggacgggagggagaagggaactgggattgtcgtgtaaaacattcctgtttctaattcaaataaaaaatgataaaagaaatagggatgtctgagtccctcatcaccaggaaaacacaaaagaataattcaaaaatatttattagctgttagtatttggaatgaagctttgaggccattattcctttatcacactcaatcttaagatggacagtgagggcctgtggagatgtgcatctagtggggtaggaatgggggtggggctggcagatgaggaaaggaggggagggaggaggcagaaccagagccagccagccagccagccagccagccacacacacacacacacacacacacacacacacacacacacacacacacacatacagagagagagagagacagagagagagagagacagagagagacagagagagacagagagagacagagagagagacagagagagagacagagagagagacagagagagagacagagagagaaccccgtattatggtatctgttttcagtgctgctagccagcctcgggtacacccgctcttctgcccaccacagaattccaggttctgacaacatagtagttggctggagcacctgtatttgagatgtgaacgtggttgtttcaaggaactatatctgaaagaatgatttctggaagagagagacagagagagagtttcaaggaattgtggcagaaaggccagtcctcatgggaacaaaatcaggcaaatgacaccagaagatgcttaaggtccacaaatttataccacataaaaagtttagaaatcatcagtgtgggagagtggaccacaaaaagacagcagaacaaaacaaaacaacaacaaaagaggagtcaaggaaacgagataagaagataaaacactgaggctcctggccctcgcttggaaagcttcttttcgcagagggtcctggttaataccaagtcacaactgctcaaagtgcaggcaaataagtgactgcaggattctcagccacaaatggagatcagcatcactccatcgcccaactgtccctgcaccccaggctgggagaacaccaaggaagaagtggtgaacagttgagtcagaggtagggaagggctgctgagaatccatgtcttctggacatggcagaattgatgcactcacagaagctgtggtttcctgtacaagaccgaattcacctttattttatttaatagcatgcccccacccatacacaaggagggtaacattagcaattcagacacaccaaaaaaagagtcacaaagggttgccttcatgtatcagtttacatcctccctagaaggggtgtgagccataaagtaagatgctgcaggggagatatcatatcaattttagtacagtagttagacttcttacatctttatgagttgctgctgttactgcttgaatctggaatgcccccaacaggttcatgtcttaagcacccagcttccagcttgtagctccatttggagggctatggggcccttaggatgtgcagcaggttaggaaagaggggacaaaacttgatgtcctccatggcgctggttttgaggcctgaagaatgtaagtcctggagtcaagagggctcatatctggttacagagagaatcctgtgaggccaggcaatgtgtaataaataaggtgggattctttgcagggaacctttgtgcaggctatgcctgaaactgtgatggtgctgcataagtcacaaaggagaccccagggtacaggagatgccaggaacacggggtacctgccaagaaatatctcaggcactgaacagagccagctccagaaaggaagttatgtttgcagcaaatggcagagccacagggatgaaactgccaaaggccactggagcttatataatgccaccatgtgctatagaggctgggcatagaggcataggattttgatgctgctttgcctaaatgcctccttgttatctttgtgttgatccctttttggatggcattaaatgctgtgtgtgtgtgtgtgtgtgtgtgtgtgtgtgtgtgtgtgtgtgtgtgtgtgtgtgtgtgttcctctgtgatactaccatccaaaattctggcattgcatattagctgtgcatacatttcttttttaccttaccgaagcttatagttaagagttcacctgatcaaggtatggtggcacagacctttgatcccagcactcaggaggcagaggcaggatctctgtgagttcaaggccagcctggtctacaaaacaagttccaggacagccagggctgttacacagagaaaacctgtctagaaaaaataacaacaaagagtttgcctgagtcttagaagaggctttggattttgaacaatgtccagacagttaagactacagggggctttgaagcggtctaaatgtattttgcattgtgagatgaccaaaggcctttggggacatgctgtggttgaaatgttttggcttgaatctgtggtctccataggctcatgttttgcatacacagtgaccaacttgtggcactacttgaagcctcatgtagattataaagggtgtgttggcaggagttatagctggtttcccacgcattctctgctgcctggcccatgactcatgggacacctccacatcaggtccccattgccatgggttaagctgccatgacctccctactacgagggactgaaatgtctgaaatcatgagggtaaacaaacccttcctcccttacactatttctgtcaggtaaccatgatggaaaaataattaacacgtgaatacataactgaaaaaaaaaacagtacaaatgagttcaggccttatccatggtttcaggtattcactggagactatggattgtgtccgtcatacagaaagggagaccactctgctatgaagtttggcagggattttttttttcacatgaaaggagactcatgtctgcctctctcaaaaaaaaaaaaaaaaaagaaggcctacagtggtacagtggtttctggtttactgtaggacaaaagacacagatagagggaagaacaaacctccttctggaggcctctatctccaatctccagaattcaaagtacatatccattttggtcccttcaggctcatgaagagtgggggttgaaaactgtagacgacagtgtgccatcactgggttaaagaggaatatgcaacagaggaatgccacagagctgggtaccacctggtggcatttgcatcttacaaaggttcatctgtgactaggtaaggttcttagggttgataccctcagcagtgggttgtaacaataagtctttctgccaggccgcccaagttccgcccacctccatgttaaggttccaagtaacacacagagacttatattagttacaaatgctgcttggtcaatgactaggatttctcatctgttagctcagtcttaattatcataaatctatatattttataagacttattggacaccagtggcaagcgtcctgtcttcccaggctcacatggtgactctccctttctcctacatttcccagaatcctccttgactcctagtcccacctatcttgttttcctattggccaacagtgctttatttatcaaccaatgagacagtcatatacacagaaggacctcccccatcagtgggtgtctactcatatccatcaagcccgtaaataaccagctggctcagcaaggatgacagacaatggtctgctacttcatcaccatggactagtggagactcataagtgagtaatatttatagccaacaaatcagaggctgccacttcccatgcacagtcatgtaagagaatctttacccacctcctagctgagagacagtcataaggacatggcagagggcaagagagagtaatgagagtgtaggggccacactcatgactctttatcaccaaccactgtaagtgaagccccagcctggactgggaggagtcgggagagattggcttttctcaacaacctagtggggatggagaggagtgagaccaaagtgagacactgtgaggactgctccactcagctgacaacagttatttgtgtaataaggcagttccacgtttatacatgcaatgagtcaacacacctcaatcaaaatgctttagaaaaggaaagaacaattgtaaaagcatcagagcattggagaaaaaatgcaatcccaggcacaaagtgaatacgtttcattttgattgaacgtaatttcctcaatgaagtgatactcatgagcttttatgcactaaatgacatacaatgaagatttgcaaaagatattttgaaggattgcaagaagagaatttataatgctgtacatgtaagagcctttaacatatgcccaggcaattaaggcttggtgaggactttgcttactcgcaggcatgcagcagagcctagcctagaatctagctagcatctgttgatcactggtacatgaaacaggttcactgtatattggttttatattatcttcccaagtccttgagacagaacataagctctaagttagagaaagtaggtttcttaagttgctatgacttccccaccatgagggactgaaaagtccaaaattatgagggtaaacaagcccttcctctcttacactgcttctttcaggtagccgtgatgaaaaaataattaacacacagatatacaattgcaaaaatgctaaaaatgagtttagttctatccactaaccgatgggatgaaagggaagaaataagccaaagatctttgtggaaattcattcagacaatagctattgggtactggtcctttttgggcatggtttgaggtgctgtgagtggacctgagaagcagagagacatgtgtgctctctttcttgtgtggtggttggagatctgatcacagcttccagcgcctctgtgcagaagtctgaggcagctaccttattgccatttgtgagtgttccccaaataaatatttgatatccctctattttgggttctcatggactctcacaccatttgctttagaagattttccatgagcaagacctaaggcacaggaaaactgcctggggtgggcaagattctcaactgtgtgctcccctgcctcctgttcttgtgaggatgtaaggtgttacttggtaatttctggtaagatagctcagcctggattaagtccatacctcttgctatttgtttagtgggcaaaactttaaagggcattcatctcttagtggacagagaaacaaagccttgcctgttccaggcagttcctccctaactcaggctgctatatcacctgagaggaacaggttttaggcagttcctctctcactagcacagtctagtcattcatgagaaccgcaaggccctctggagaactaccctccagttgttagcattctttgtattccaaagagctgatttgctcatgcatgcccagaggtatgtgggacatctatgtcaacctcctttccaagacccagtggacatctcagaagagagggtaaaaagagctggaagatgggaaggagacacatgaaatgctatcttctgctcatgtcatggctattgcactcttgaacacacaatggcagtggctacctgcacaagaccttcgaaagatcaagccagtaaagaattctagcatgaagtgggtagagctattgaggcctcacttctagctgaggaattagtggcagttgatgaacattggagggggtgtgtctttaggggtgtggctgctggtagtttgctcatgccccagtgcatatgggacacactaattgggcttggtgtgtgtgtgtgtgtgtgtgtgtgtgtgtgtgtgtgtgtgtgtgtgtgtgtaagagagagagagagagagagagagagagagagagagagagggagagagagagagagaacatgggtaaggagggagaagaattatgggagatacaggggaattggagggggtgatagtggttatgaccaagatacaaatatgggattttcaaagaataaagaaacaaaaaacccaaagagcaaattttcccctttggcctgtgtacacttgtatacacagctgaaaaatgaaacacatccacgtaactaaagtcagacactttggggatattcctctgttgatcacaagacatgacaaagagggttctcatgattatacatagagggcattattgcctaaaagggaagaatacctttgaaaggctgaagcagattaattcttggccttcagaaataactcttcctccttaaagcaaaagcaaaagcaaagaaatagccaagcagcactcaaaggcagcatcacttcgctgagtgtgaaagtaccctcgatacaccaactgcattcatctttcttccctccctctctccctccctccctcccttgtcttttttcaaacagttggggagataagcaaaatcaaaaggggaaagtgctttcctctggtccccagtagcctggcaatcagtcacagaccagacgctgaaaaacacagcgtctcttcagctgtttttagaaagtaccaaaagaacaaactgctctacattgaaacaacaaaagtaccaggctgagcgtagcattctctttgtgaagtctttctgcatataaagtcagcacttggaaaccatgtaagttctagtgaaggaaggaaggagggaaaagataaataagtctcaccatctagtacataaggcattggaaaaaatcagaagtaatcattgaaaacttctaaatggcataaaattaataagaatcagacagcccaactgtactcgtattaactctgtaaactgcatttgaacttgtggaactttggtatttctgggaaggacaaaaggagatgacagagtgacactcacattttaaaggagaattctggacctaatctctgcttgctgtctgttattcacccacccaactgtgagcccagccttcccattcatccctagggtaagccttgagtggggtctggggttgcctagagcagtaaggtcttagtgtcctgtctataacggatgacaatgctgggtcccggcaagtgtttgtgactaaggctaactggtgagtaatctcccagaccagtaggctatctttagtgctctcattcttaaaagttcctgtctgtaaacatgttttaacccagtattttgactgcttcccttgaccagcccaattttcttgagacaatactaccatgttctagtctgttttctcctgttgtaatgttgttattatagacagggaattttgtaatggtgtaacttacttctcatagttttagaggatggaaagtccatgatcaaggcacttcttgctgcattaccacatggcagaaggtgtaagtgcagacctgcattgtaaaggtctattcaacatcttggtgcctaaccatctaaacggcaccccaaagtttccattcccaacccggttgcattcaggattatgatttaacctgtggattttagacaaaaataatgaagccatagagtacttcatacattgttgtatagcaagtatcaagtaattaaattgcttaatttctatcatgtaggcacatggctgggtgatgaactgtttattaagtagcctatggaataatactaaacaagtgaaaatatataacattgactctcctttaaatacagataaaaactaagtcaaataagtaactgaataaaatatccaaacatagaaaccaaatctttctttcctcccccccttcctctctttttctgtgtgtctctatcaatgacttcaatagatttattatttatctagaaaatttcaataaaaagcctttacttaactttcaacatccatggataaagatacaggaattgaatactgctttctcattaaatgagaagtttgtcctgaaatgtgatctggttgtttgatttccatcaagagggctggcttccagtggcagcttgttctgaaaatactctgtactttagttctgtaaatctggctctgttatcttttcgggagcagagggggcagggtggggtgactcaggcatgcaggaataggaaagaacagtgatttcttagaaataaaaagttgaaatcaaattctttgagccaacagggaagttggtgcaattgtgggcatgtgcacacatgcaggtctatgtttagcgccatgattcagagccaggaagaatcaagattttataatcatacctgttagatgcctcctctcccagtttcctgtggatcgggatgagagaacgggcattttcatttctcatgcaacactcacaatatattatgttcatagtcttcctcacaatctttagtaactagcagaatactaagaatttgtccaaagcatgctccaaaagtaaccccagacttgttcatttgtgtttcttgaagacgatgatgacattttatagtgacattcttgtctacaccggaagccttactgatctcaccatttttttccgcccgaagataatgtaactcaaagatgataacttcacaaaagcctttttagctcgccctagttctagctcagccaacatctgtaaggaacaaattcaacttgaggaaggttaaagacatcagattcaagatgttggaatcccacaggctacaaccgggaagtagagtggacttagggtcagtgaaggagttcgaatctcaccgcaggactgaataagacaaaacactggatgaattcaagctccaggctagaaatgctctaggttccatattttagccctgttattactcagttttctaggctcttttagccaagaatcaatccaccaatgacttgcttgggcatctatggactctcttagggaaggagccccccccccaagcctatatatacatttgctctatcactgagaaaatatatgtagagtagtaggtgtccacatccatgtacagcagcccaggaacctaaagacctctcacctatttaaaggtacaggatagggttagttcttctgggaaatgggaccctcccaacctggttattgcagatgggggagcagtctcaggaagcggactctgaggtggaagtagtcaagggagaaatttttaagggttattggagaaaatctgtgggagggataggaagaagggaggattgggtggaggaagaagctgaaccatgggcagtgttaacagatgccgagccaaccagatgaggaagtttagaggagcaacaaaagagcaaaagtgttcccagaaggggctccttctacagtgttaaccagccattagaaacaaatcctttgggaaacagatgtgatcttggtaggcagtttgtttaagctgggtgacttacaaagggggatgatggatgagagtgcagtgttgggggggtctcctttgctgggggtgattggtccttcattcctaagttgggatcttgttagttcacccaggatctcccacacccacctcccacttgaactcaagttcccattattgatctacattgtaaagcaggtagttattcaggccctgatgagtgaaggactgacttggttgccaagttcaagaccagccctagtgaaatggaagagatgacagatttgttaccagaggtcctgatttcctgtccggactcctttgttccctccctagcacttcttcctctcattatttccttcctcaactgactactcacttatagcatgaattctaattgttcttcataacaataattaaaacaccagagtcagatataggggttaatactgaagattagagaagcagagcaaccagctactagagagttctcacctctgccaatgcttagacccaagaggcaatcctgctctcaggctgctcctcagattgtatctctctcttgtctcttcccgcctcatattcctctctctgcccagtcatatgccttcctctctccacctccttagtgctggaattaaaggcacatcactccaagtgctgggattacctttgtgtgagctgtttctcttttagactggatcaatctcgtgtagtccagtgtggccttgaactaacagagatccatatgcctctgtttccccgagtcctgggattaaaggtgtgagccaccactgcctggcctctacggctaactagtgtggcttgctttgcattctgatcttcaggcaagctttttttgttagatcataaaaaaaaaaaatcaccacactcactcatctgcttacttttccgtttcccagatccacctcttgggtgaaaatgacctaattaattagttcctcaaaccttcaatgacagaagtttgatctgcttttcagtgtgaaacttaaggccaacaatgtggcattctcttgaatttcaggttgtttttggtgatggcaacagcatcttacgtctaggaagaacatggtattgactcctctgtcttttgaaagttaagggtggccctagagagatctgggaaacttagcatggatcagacagcaaatgatacagagaaatgagctgcttacatagttcttgtctgctgagtatcactgaaaagtactgagagcaaccaggtctggaggccttggagtcggaactattttacccaactactcaggctgaagaatcaaagttgagcagtttctatcctgaactgagcacaaatccatctcttgtcacatgtgtggggcatgttaaagtaaatctaagtagagaactggaggatctagatcttgttaagtttatagaaagggctattgtcagctcctccgcctgtgtgctgatgggggcccatctgttctgtcagtctactttccagtagcaagaactgttgagactctaaaagaaggctcagtgaaaacagtctcaaaatattttccttatatatcatcactttccattgttcaaggccaaaacagtattcgcagaggtcttatgaatgcaaacatgctatcaaaactgcttttattgttccatataaagctgtcttattatttgggacaacctaacttttcctgacagtgtgatttacaccatcaaataacaagcttggcatggtattttgaaaattctcattatgcacattttatatacctgaggattgtgttataggtgtttaacgcaatgtgttaaataagcaagctatcaaaggaatggacttggggaaaacaaaaacaaaaacaaattttgattgcagttcaattctgtttcaaatggcccttctttcttcccactgggattgttttgttctgcatctgtatgtaaaatgcaaaaaaaagtactcttcccatagaattttgtatggatacatatagtatatgaaaaacacttcaaatagtgttttccacatagaaaagtatttacagtaaatgttaggtgtcattattaaatataagtcagaattaaaaattgggagatgctgtacaaatgtaagataatttgatttctatttcaataggtcattgatgattcaagccaagtttaattctaatattggaattacagctttatgataaagcagagaatgaatgatttggcttctgttaggctgcacctcatagttggctatgtgtcctttctattcatagagatagcctgaggcacgtatgcacagagcatagctggtgagttgattcatggaggttttgcttttctgagttatgtcatcatccacctatgcaattttagacaagtctgttaacatatttgattcttacatttttttttgccaatgagaataataacagcttctcaactttgtagaatgttagagagaggcttagttaagatattcagtatttagctgggtggtggtggcatgcacctttaataccagcacttgggaggcagaggcaggaggatctctgtgagtttgagtccagcctggtctccagagtgagttccaggacagccagggatacacagagggaccttgtttcaaaaaagcaaaacaaaataaaaaaagatattcagtattcaaatagaggttcttatcttccactgactattctttctgccattttggtagaactttattcttcataaaaacagtaggctgtttaaacactttcttttcttttttgttcagtcttctccttgatgcaaagctgaaagaagactcagtaagttataatctaaggcttagactctaatggcttttgtggcctgtggaactaggaggaacattttgactagtgttcattcagcctaatggccaatatggaagagtacggtgcttttgaaaggcttagttttgaggtttaatagattaactccttaatgaatcaaacatttgtatttttgcaatattctataaatgttaatattacagagttgagcaactggatggagaataatgtatgagattatactttatttttccccatttttgctcttcagttgcaactgtggcttgattctgcttgcgtttcaaatggaatgactggtgttatagcatcactctaggggttagcaatcgcaacactgggcagaacaaagagtaactaccatgagtcactggaaatcaggcagtatataccatgatgattgagagaaacacttgagactccctttgctgtagatttcctattgggagacattttcctaatgcaggtatagagagtgtgatctgagcagattgacgtcattctcctgagctgaggaaacaccggtcatgttttggcattggaagtggcaaagcagagagggccaaaaagaaggagcctcagagttggggtgaaacattggaagaaggtgagccagagttcttggctgagactttcaagtgcaatgagggactacatagccttatcaagagcaactatcacataactatggaccagagataataaaaagatctagaactggtgatctcccccagctaaaggagggacaacttaatcctccacctttgtgattcccaacttgctctgtgaaatacaaatctttcacaagaagccaaacagagggtttccacagatctactctatgaagtccgaggatgaaggaacacaaatttagggtagtcagccaaaaactgatttgtgtgctacaacaaaatggaacattctctcaaggacaataacaacacagtttctatgttatatcatgggtaatacatattggtaaaacatttattgggttttcaaagaaacaggaaaatgaggcaggaagaaacagatgagaaacaaccccaggatgatgtaagtgtaggatttaccatgtgtaataattagtgtcaactgggaagggagtctcctgaagattgtctacaaaaggttggcctatgagcaagtctgtagggaaattgtcctgattatatcaattaggttagagaggttcacccattgtgggtagcaccattccctaagctctgagagctaacctgcaagcattctttgctctctctttcggactacagacatgatgtgaccagctgcatcaggttcctgctgtcttgacttcctggccacaagagactgtgtttctcccttaagtccattctgccagaatattttgttacaacaacaggaaaagaaactaagatacatgaacaaactttagagaagcaattctatgttggatcccaggaattttcagatctttaataatcttccttcatttacttcattgtgctaaccttgtagaaaccatagcaacctctgagagagggtgaatcataagtgattatttttgcttagtctgtacatatgtaaaaattcagctttgtattcttgttttactgcttagtaggatatggagtttaaatttagaaacaatttttgtttagatttctgaagacttctttgtattactgtccccactgttaactgttgagaagtcctaaagtatcttgatgctatattctgctgttgccttcaaattttctcagactcttatgttttgggtaaaatttagttttatatggatatgcaaatggggaagaacagctttccccatttttaaaacagagaggaaagttggaaaacttgtcctttcactgggaaatgagattaaggagagacagaggccaggaaggcctggggtgatggggccagaataatggcttctggacaagacagggcagcaacactcagaagctcacatagcctgtacaagacctgcacaagacaagccagtcaacagtccagcatggaactgaggccttttgatttcaagacttagtcatgaagtcactgtaatcaagaatgttgttcgtggtatgcagacagacattggtcagtgaaatagcttggcaattctaaaacagatctacacgtcttcctcaagcacatgagtgaagaatacattttcaacaaatgctgcctaaacaatggggtagtctcatgggcaaaatgaggttctttcctttcttcatgaacatttttgtttttacttcaaatgggccatatatctagacattaacatggaaactataaagttttatcagaaaactcagagtgaagatttcttagctagtgcatatagggagcaaaatgtgaaacacatttggtaaatttatttaaaaatttagacttttttattttttgaaagaatgcatttagaaaataaaaaggcaagccccaggctagaagagaaaaattaatgatatatatgtttgacaaagaatcgtatccagactatatgaggagctagtgagaagtcagacaacccaacctgaaaagaatggaagggttggccactttaggaaagaagacacaccaaggagatagtaagcacaccacataggctcacaacgttcatcctttcagcgtggggtaaaactccagggagctcccccagcaggcccacaggagggactatatgaaaagatagaaacagtaaatgtgaataccgtggacaactggaactctcacttcttagccatgcacaaacgcctctgcagttcctataggaacctctggttttaaatgccttgactatgcaatgacatgctttgaaatctttgaaaggtgggtgatgtctttctgtatatatgtttctcttattggttgatgaataaaacactgattggccaatagaggcaggaagataggcaggactaggagataaggagcattctgggaggaggaaagcagagaggagctgccacgggacaccatgtagtcgctgaaggagtaacatgctggagcactctctggtaagagaagaccacgtggaaatgcttagatgaatagaaatgggttaataattaagaaagagctagccaataagaagcctgagccatcggccaaacagtttatagttaatataagcgtctgtgtgtttatttggggctaaatggctgccggaccaggcggaaaagaaaggtaggctaggatactgtatggaatagtctggtatgaaaatgaatgcagaaaaccccattctgtagatagataaatctgtgccccatcctggcatgtcattatacaatttgtgcccttgccaggagttcctgtcttaagattttagccaagagaatggaaagcatatgtccatgcagacttgtatgtatgtgtctaaacagtatcattcacaataaccaagaactggaggaaatctaaatgctcaacaaaaggcaaatgtttgaattaattatgatatattgagatgatgtaacacttttcagaaataaaaaagagcacgttaaatacacacagtcagattgacaaatttcagtagcttacactgaatgaagaagtgaggcacaagagaatctaatgattccattcattaaatttcacaccagttatagctattctccattgacagaaaatggatcaacagttgctgggaaccaggcatagagcaaatgatatcaaagagacataaggaaaggtgttggagtgatggaagcattctatgtctgtctcaactgctatggaaatgtatttgtcaagattcattgaaccttacccttaaaatgggtacaacttacactgtacacattataccataataaagttattaaaaatccacatggggttgtccctacattgtaagttgctgccacacaggtttctactctttgacacatcttttgccatccttataacctgaaatacagatgaaatagtatcatgccttcaaggctgcaattggaaccagccaaacaacctcaggtctaaccctgagtggaggagtgtggaggcaaggtaggctaactttccaaaggtattaaagaagagacagagacgtctggctggtcatatcagcagggcagtcagttaatactgaaggccacagcttattgataggtcatcttaagtaaccatccaaaggtggggacaatggcagaagacatcaattatcatatatagaaggctgatagcaaatatttccctcaatcctagagacactcctttgctgcatatactcaagccctcaggcaccccacaccagcactgtcttactagtcttcagaatgaatgtaaactctcctgggcccaagtctattgttgtttagaataggagcctttctccaccgaggccaggtcttccagtggctatcagctgccatctaaaagacaatagaattctgggctctccagaactcagtggctgggaggaatagatttccaaaatatacaggtccaacaaaatagcaaaatggcagaagaaaaagaagaaaaaccaaagtgtatgatttccaaatgattgttatcttgaatatgcagtgacatgctttgaaacctttgaaaggtgaaatgacaatgtctgctcatgcaaaggaattcagaaaaccccattcagtagctaaactggagtcctgtctgggcatgcaaagagtggcatggatatgcagtacctgttttctaaggatgagaagtcagacaaatacatctacatagaaactttgctgcatagggttgactttttgaggactcaacaagcttgtctctctctgagatattatttataaacattgtgctagtgaagaaagcaagagaatgtcattaagagggacatatttcctgcttataaagacctttagaagcacaaaggataaagtccagtgagggtatctcaaggatggaggaggccagtgtgtgggctgccctagaagaaagccccgccaccacttgctgatgccaggagatatttttcccacttaacaagcaagttgaaataaataatttgtatttccttagaaatatcacattaattttaaaagtcttagaatttaccattgagtatagaaaaagaatggaaatttagaaatgaagaagagataccaaatgagtgagatgtgttaaaacatattaaacttattaaaatatttggccttaatcatttgtgccatgattagaaattaagcattaaacaaatgatatatttataggacaagtagacaaaaatgagtattaatggactattggattggtagaatttttttcaaaagttgttcaaatgtatatagttgcatatattgcaggcaataacaatattcatagataagctgagtcaatgtctggtatttgctgctgtataatctgggtaatgagaagtacacaatttaggcaactttaatttgattcttataggatagtagctcatggaattcattactatggataaatgggaaggctggtgctcgtcttctggggaacagcctgaagtatgctaagtaaggccacagaacttgaaaggaggtctcacagagcctcactctgcttgaggagtccctctagtcccttcctttgcctctatccatgtttttacagactctgtcttcttggcttgagtcttggctcttccctttctctggggttgacttagggtagttgatgggtgctacactttcttagagtgttgtctccagtagagtctacatgtttaagaaccacagccagtcagcgccaaggacttcagcctctggggtataacagttctataggagcttctaaagactttgtctatttgatgatgtacaaagaaaacccataaacagaatttatagctggcacttagaattaagagaaaagggtgaaattaggggttcattctaccaaagaacttagcaagtaatgttacaaacctcatataaaacaattccacaaactgctatttgcattcattttggatttcctcaggatgctataaattggaactgttttgtgtcacaacataagatcatttttttactatgaccagtgccccaagggagattgaaaagccttaggaaaataattccagtatgcaataatcaaaagaacaaaaggatacaggaaagaaacaaaacaaccaaatgaaaatgcctttctagtcaaactggcaataattggtcacctaaatcagagaatgaaactgtgccaacttctcagacatcagaagtaaccccagaatggatgcatactttggtatcgcctgagtgacttctctttttttatggctttacttactgtgttttatgtttgtctattgagtcctcctacatttttgttgctgttgttacttgataattgccattttagactggaatctgtctgtttctaggtgcagcaaatatgataccagcctatagcaggaggactgagtgaggttgtgagattttgagcaacgacccataatgaaaaaccacccctcatccaacccatggtaagaacatgatgaggtgacattagttaggttgaaggtgagacacctagagtcctgagagcctggctatttgccaaggccatatttggccaaagaatatgtgctttttgaaatcccagcaggtaggcacctacacatgcttagctaatgaagggtatgtttattcttgcagccctaggatggagataacgaccccctcctgccaaacaagaactttcatagtgcccacagatgggagttgtttttttttttttaatataagtcctctgaaatctgcgacactcacaacctcttcttgtctgagtgccactttgggatcagtttatgtgttcccatctctttaaacaaagacgttagcccagtgctgggggtgtagctcagtggtggatctaagtgcttcaggccctgggtgttaaccccaggatcacattaagaaaagtaatgaagtcagcttccagctgaaatagtacattgaagagcataactaagatggagaatcttcctcagaatgataggatcatttggaaaatgctcaaaatttgatggtggcgatagagggcaaaaaatatgaaatgatggaaagaaagggcgagcacagcaaggtagaccttataaggaatgcaaatcacacttatcagatggcttcacagggtgacactaatggtagtgagtcccagggcaagaaggaggccaggcctgccatactgaaggcagaatgctgagaagcttggcacggctcctctgagcagtcagccatgattcactgggaacacagctggggtctcaggcagatgggagagaactcagcagtgtaggcactgtggcttcctggcaccacagacattcacagctccatcatctccgatgcagaacagggccttgccaagctgtctttgccaagagggcagagcctgctcaggttcacattttctcctctttgcagatggcaaatgaggtagcaaggatggcatttgggacactcctggcagagagggcatcccccagttcctgctccctatgttagaccttgctctctttcaactccccctgctcctgctttttgctggaagagcctggaagggctttggttggacctgagttcaagtctgccctctctccttacttgctgtgtggcttggaggaaagcactgggctcctgcaagcctcagttttctccgtgacgagacagagagccaacaacacttgcaggaggaatgggatagtatatgaaggacattgccaatgctcaacacccactccagtcaatctcagggcttttgatatatgcagctatgaggagtggtcttgtgtggcgtaaggtgtttagcaccatgcctggtctctacaaacttgatgtcagaaatgcctccactccagttggagcaataaaaaaaaaaaagactctaaacacagccaaatgtctccgaggggacaaagtggtttctggctaattatgatttctggttcatttgcctcttagttttgggggagcaaactgccatgctagggacagtccaagtagcttttcactggttgcataggttaaaaagtgagctggtagagtgagcctaaagggtttggagagctggctcagcagcccagagcatgcactgctcttgtaggggacccagttgctgtgtcaggtgactcataactgcctgcaactctggctggaggagattcaaacccttctggcctcacagatcctgtgatcacatgtacacacacacactctctctctctctctctctctctctctctctctctctctcacacacacacacacacacacacacacacacacacacacacacacacaataaatttagggcaggcctcaacccaatctacttggtatctttatgataagagaaaatttgagcaaatgaaaattggggtgtgctgaaacagagagggccctggaaagccaagaaggcaggcctcagagcaacctaagccttgatttagaaattgcagcctcaagaactgtcatcaaattaatctttgcttcctgaggacagtcagtctttggtattctgttacagcaaccttggcaaaaggatagggtcagttcttggagtctgatggtgcccactaagttcagatgtgtcatgtccgtggcgatgtgtgtgacttcttcagagcctcaccggatggccttccaaggacaaggctttgcagtatggtaaagacagcaacaacagccacagcaacaacaagcatactggaattaacctttcctaacccactgagggccccccactcgatactctgtagcttcccacttgtgaggtctctctcctgatagccaaacctgctaggtagggtccctagcaaagtgtcttgtgtcagatacattttgaggatcatttctctccaggaagcccacataagtttgtcacatttgagagtgagttgacacactccctcaggttgtagcctctgcctagtcctttctcctctgacagacagcaggcagaacagctccactaaataagcctgtatctgaacataaaacaaacaaacaacaaaacaacaacaacaaaaaccatgatgacctcttcttgtctgcattgtggtcactgcctgcctcccttctttatctctcctggggatgctcctctcacagagatagaaggggagctgtggtattccaactaagtctgacattccaaggctcagaactttttcacattgtggtggacacaatccacagagtcaggaagaaattatatgccatgctgagtaactgagtgaacgaactgttcttattttccccaaggaggtgcctggctgcagttgcttttgagtagactctctgtgtgacacaggctacttatcactttggtgagtagactgttctgtgacaacaggaaaagccttactcagcatcttactacagttcagtttacttagaataagttttatttcatctatatatggcagttttgcctccatgtttatattacatcagaaggtgtcagattccttggaacagatggctgtgagctaccatgtgggtattggaaaccaaactccagtccttcttgaacactgagccatttctctggacccttaaaatatattttattgaggccagtgaggtgatttctctctttggctttcactttgacctaactcaggacagaactgatctttgttgtttccttcttccttccttccttccttccttccttccttccttccttcctccctcccttccttccttcctatagatttatttatttgttatgtttacagtgttctgcctgcatgtatccctgcaggccagaagagggcaccagactacattacagatggttgtgagccactatgtggttgctgggaattgaactcaggacctctggaataacaggcagtgttcttaacccttgagccatatctgcagcccatctttctttctttttttatgcttaaggactgacttatttatctttttgtggagtgttggatgtgtatacatttgtacatgtgtttgtggagaccagaggacaatgtctttctcagtttctctccattatgtcttttgagatagagtcttgccctgaatctagagattagagattcagcaaagctgactggtcaccaaactccagggatccacctgtctttgtctccccagtactaaggtgcacactcctatgcctggtttgtatatggttgctagggatctgaactgtggtccccatgtttgcatggaaagtactttcctactgaagaaactcccagcaccagaactgatttttctggttgtgagcctgaatcttgaaaggctgagccatctctctgacctcacagaactcgtttttttctaaaggatcacctaagtgatagctaggtctctatttcttggaaaggatacatttaaaacaagaatctacaacttggtctgcgattctagcttgggcttgacaggagggtcaggagcagagtggccatgataaactaatcaggtgcagactctcaatgataggaaaggtgttttgcttagagctcgctgaagagagacagccacagtgcagtgtcagtgtgctgagaacccggggaaagaagagaacagccataggcccctacctggtgcacattcttgggaaagagtagagtggctgggttagactttccatcatcatgtgcactcgtgcaaaatcaactgaaaacgcagaattgcagtttatttttctgttgctgacaggatacgctgagtaaagtaccttaagggaggtttatttgacccacagttccaggttgaagtgcttcattgctgggaagtcaaggcaacaggaacttgaagcaactggtcacataatcatggtcaagagcagaaagtagggactggagagatagttcagaggataagaacaccgcctgttctttcagaagtcctgaggtcaattcccagtaaccacatggtagctcacaaccatcgataacgggatcatatgccctcttttggcatgcagacgtgcatgcaggcagaacactgtatacataataaataaatgcatctttaaaaaaagagcagagagcagtggattaatgatgcatgctagtgctcagttcactttctctattcgtacataattcacaatttcctgcctagggaattgtcacctagagtggcacctcctcttacctcaggtaaggtagttgacgtaatccctactgtagataactccacattgagattcccttcccaagtgattctagtttgtgtcaaataaacaaaaccaatcaccacaggcaataaatgtttattttagcttatggtttcaccagtttcagttcacggtcaagtggctgaattgtttcttggcagtggtgaaacagaacaccatggtagaggacacggcagagtagagctgatctcttcatggcatccaggaagggccagggctaagatatgctttcaatggcacgcctccagagactcatctcctccaagagtatttttctacagtgtcttcacctcctaatagtttattcagatttgaatccaccaaatggatcaatccattcattaggttcaaaatctcataagctagctgtgtcttacactcacacaccctgaagcatgtttcactgatcttctagatccctctcaatccaatgaatttaacaataaagattaaccattacgatggctatagacataggtcataatcagacattggtttgagtcttggttctgccaaatgtttgttgaatgactcagaccaagttacttaacccataacctgtgacatttggctcccatctccataaaacaatgaaggtttttataacacatagatattgtgaaaatttcctcccatgatttgtttttgtttattttgagacagaatctcactgttttgtccagactgccctcaaactcacagcaatcctcctgcctcatctccacagtgcaggtgtacatcattatggccagctatggtttcttaagttgtatacctgataaatctcaggtgatataatgtctaatgtctatccaataaagagttcaactggccagttcttagtattgtgaacattgagcaaaaggctcaacaaaacaaaacaaacaaacaaaccaaaacccgatctggttccttctcatgacaagaaaccttcttactgccacatggaggactggccctatcatagtacttgacacagtaagtaggacacagaattggattctgtatgtccattggttcccggggaacctgggttttcacatccttgccagatcactgagcttcacaaagcagagtgagctgtagcccacatctgagtaaccgacatttccatccaggcctggcaacagcaggagtgtgaaatgtgagtcagttgttttattccacttcctagcagagagatgatgcctcatcccatgtgaatggagtcattcaggaagactctcctccagagtgttattcaggcagaggtcaggactgctcctaattaggcacaggctgactcagggggctgggacccgacatagcaagccagctgcagcaaagtgagctgttcttggccatctcacaaggctgtcctcttactcagtcttctagtacctgtatctttccctcctgccaacaatcataatgatatacaatgacctatttaattgtagcaaatcagtttttgctatcgtaaacaacgtcctcccaccccaagcatccatggtaggctctggttgctgaacggtcctgtcttttgctgaagatgggtgctgccagcctgcaaagttggaaggagactcactcagtaaagctgcatctgtcaccacgatgggtgtgggagcagaggtaggaaaaggaatgcctagattgggggtgggggtagggataggaaggagacacaagactgcaaggtcgggacagggcacaaggacataaaaaaaatctaagttggaaatcagacatttcataaaagactttggggtattttgctgaggtgtgatctttctctggggttttgtacaaggcttcactataagatttatataggagattttttttttaggggggactttcctgcacaaaatcttggtcagcatcggtgctgtccgctaaaattttggtacagagctgacaattcatttattggaaagaagaaagatgtgttgtgctgcaacaaagtaagccagaggtgaaaagagagtgccaggctaggctccaaagctacatagagaaaccctgtttagaaaaatggagagagagagagagagagagagagagagagagagagagagagagagagagagagagcatttgtgtaatttacagtatttgtttcacatgggctttgctaccacatggggatcaggatttcattttttactagtctatctccagagcctagcacatctaagaggtgcctaagcgtttgtcgaataaatacatttaaaaataggctccacaccacttctgatcacctgctatacgatcaagcaatgtcccctgtggcttttcttcaggcacactagagggctgatgatttagggaatggtaagtcaatcagtaggagattttaggacaccccttctagaaggatgttgttcagtcctaataaagtgatgctattggctgataacatacctgaaaaccatatccaggaagtaatctgggttatgagaaacctacctcctttactgtggagggggccaacctaatttctgtaattacagaagttacattgctaggtacttcacatgctgatctgtaacaaagacaataaagttgtactcaaagaaatacgtgcatttgttccctgttgaccctctaagaacttctattgtaaggaggaattgagctccagtcacctaggaacacataggaacaaataccaagtgtttgcagttacaacaacctttaattttttcccatttaagctgaaatgaaacacattaaactgaaagggaaactctatagcttttgtggtggaactgaaagaaaatggctgtttgaatcagcaaggtggaggcagcctaactacttactagtgaagtgaactcggagacgtaattgaatgtttggggcttcagtttccttgtctgcaatacaggagtataagtatcattgtatgttttgatggggtgatttggatgcaactgctgtgattttcccatttttcacttgttctaaaacataacacatcctctaaacttctgtgtttttttctttttttcaagtaccctgtgcgtgagcatccttaaccctacatacccctctaaggctggttcagagtctcagtgcatcttgagctaccctaagagattactcaagactgggtaatttataaagaacgtacattcatttctcacagtagtagagcctgggccaatatcaagggtatggcgattgggaagggctttctcggggatggtataaagggaagggagaaggaggtggagagattgtaggaagaggggagaataaagaggggccaaactcccctttgcatgaagaatcctctttgtgatcataaatctactgtagtgataatttcattcattgactccacctccagggttcaaccacctatcattagacttcacttcctaccacgattgcactagggactaaatttaatgcttggtggtggcggcagtaatccaaacatagtggccagcacaggacatagggagtcaagaatgacaaaaagcttgtgattcctattacacatagcacttggtcattaaggggtgtttcacatgttgttgtcaccaaaataccaccaacaaatgcctgttgtcaccaaaaaccaccaacaaaaaacccagcagcagtaatttcatccttgagagtggtgacagaatttgtaacaggtgagatggtttgtttctgaaaggactctgtggaagtaatcttggtcttaaagcaaagagaacatccaaaacaaaaccaaacaaactaaaaaccatttccttagcaaactaagttagggaaattgtggcatttctcagtgggctgtatagaaaagagaaggcagatggttcagactcgaggaacagcagaaagacccaagatgacagcaagctgggtctcagggagtgaacaaggataaaaaactagcttgtgtgcagagacccacagccaaacattagaaatcctgatgaagggagaaagtttgtaggagccagaggggtcaaggacataacaagaaaacccacagaatcaactaacctgggctcacagagtccgaaccaacaaccagggagccttcatgggactgacctaggccctatacatatatgtaacagttgtgtggcttggtcttcttgtggaattcctaacaataggagcaggggctgtccctaatgctttggctggctcctgggaacctagtcttcatactgggttgccttgcccagccttaatacaagggaggtgcttagtcttactgcaacttgatatgccatgttttgtccataaccatgggaggccagtccctttctgaacagaaacagaggaagaatggatggggggggagtggagggaggaaatgggaggagaagagggaggggaaactgtgtctgggatgtaaaataaataaatcaattaaatttaaaaaaggaattatctatgatggagaaagggacattgcaaatgttccaaatcttactttagtaactaattttggttttgtgtaagttttcaacttcagaaagaaatgaataaagagtataattttaatgtagaaccagaaatagctgaaatgtgagaagatggaaaaaaataaaaatccaacaaagtgttcctaacaagcaatatttcttgtgtttaggtttcagacttgtgtgcaggggcaccctttgttttagaccctattatggacccagtataatatagacatacttcctctgtatgaagacttatgcttcactttaattttgaaaaagtctcaggctgtctcttttccaaattctctctcttctactctgtccttctttcccagtggataatatggaactttctctgaggtctgtgtttctgagacacagacatgatccccgagcctccccattttcttgtgttttacaagtggttaacttcatgtcgttccacagaagaacaatttccaccttcctttagatacccataagactcagagattctcgtttattcagtgcgacaaaacctctgttctcttcctttttattgtgacaccctcatcattgaccgttcatctattgtagcagcctgatcaaaacccctcttgattttctggtgcacttcttgtttaacaggttaggtatggaagatacatattggattagccttctccctaatttcttcatatttctatggtaatgggaccctaaggatgattgatgattccactggaaaattccatgctgggatccccagtgtcagaagaaagaccacctccatatgcatgattccttgtgttttattttgactttatctgctataagcaaagtgaagacatactgatatcccctccccagccattgcattagttctttttcttatcgctgtgacaaaatatttgacagagggaacttaagaaatgaaaggtttatcttggctcataggttcagaacatttagtccctcgtggtggggaaggcatcacagagtttgttgtgatgggagcaggcaggcgaagtctttatatactagcaaatacaagcagagaaagctagactgcaaccaggggagggtataactgccaaaggtccacccctagagacctacttcctctaacagaccccacttcctaaaggcttcccagacgtcgaaatagcaccggaaacgggagacagcatttaaaacaagcccgttagggacattttagagtcaaaccataatataatcaaaactgtattttggccaaaactgtaagtaatttttttccatctctaagtgcttcatgttatttttctcttattttaggttagcatttagatctagaagcagtgcttatgtctggtgttctgttaaccctacctttatttcataatgcccatctcttcatctttggttgctttgccagtcatctgttgaaaatctacctaccagttcactcgtttgtgcttcagtgtctactatgaaatttaaacagaaatttattttgaaagttctatttgttttctgcctattttctcacatactactgtagtctttatcttaagcatacttctcttttagtttcatggattgttatattttctccacaccatgaaagcactgtttagtttgcttcttatgtctgtcatctccttcaaggccaatgacttcctcaagcaatgaggaatgctcttataaatgcaattgttttcactgttaactcgacacaatctagagccgcctgggaagggaggctcaatgaaggactctttagaggaggttgtctaatgtgggaattaccgatacggagtcaggtaaaaatagaaggttatttattaggggggagccttacttacagagcgacctagccagccagcagggcagaagtacagcaagccgaagatgaaaaggcagaagggagttccaggtgtgtgtgcacacgcgcgcccctcgctcttaaaccttccctacgtcaccctgaccacgccctcgaaggcgtggtcaggcatacctgtagccagccctagccacagttgtccctacagttggcctatgggcacgtctacagaagattatactgatgggtaggaagacctgtctgtccactgtaggtggcaccattccctggcaggtgatcatatcctctttgcctttgtttctcacactggctcgtgtcaggtcttctctgagctccgggtgattttttttttttttttttttttttaagatttcatgaatgtggattgattttgagacagaggaagcaccgctttcattccttactagaaaatgctgtcatgtcaagcagtgctggtcccttcctgcagtatccacacctgcatacggtgtgtgatttctgcctatcaagggagacagaggcggtggcagggtgggaaagcagaggtgcagatgaggacttacctgccgagctccaccttaaacatcgtccacactattaggttattttggaagtatattctccctgttttttttttaaatggaagaacaacatacagaaaagtatagatatcacaggtgtgcaactcagtacgattttgaattgttaacagtttcaaacggttgaaaaaaaatgtccttcttatgtttctcaaaacccttaaagaccaaatttctccccagcttctaggattcctctcacctaaatcataagagagaaagaaggggggcatggctattgggatttcatattaaattcatgttgtgactttggttttatacctaccatctatgaacagtggcttcagacttacaaaaatctagtttacagttgtcacgtgataagtgaagctcagggagcctgcttgcacttcatcaggaaaaccttaatttttaaaactaatcagttttacacattttccatagcaccaagctaaagtgccttctaaatatgtctatcatatgatacccaaagacaaaagctattctcagccttagtcagagaggcctgaaggcagtgtctgcagactcatggctgccaaagatgctgaaaataagtgacagctaagagcctacccctaaacaagacatttcatcctactcctgcttactgctagtctattactggagtgtgttgagagtaggtaggagatgagagtaaccagaacatattgtatacctgtatggaattgtgaatgagaaaattgattaaataaaagtatcaataaatatttttctgtccatttacatgtcagctggttttctggtttgattagtgaaatatctttgatatgcatatatcttacatttcagatttattgtgagcttttcattgtccaaaccaccaattttcacctttactcttctaatcctaaatagtgaacccaacaatgatgtctggcatcgatacacagcagctccaaagaaccagctccaaagttagctgttggaccacccaatcttgagtctatttgtgtcaaacaaaattcttcctaaattcttatctctaggcttgcttttattctaatgcgacatgaaacagaaccaagagtttgacatgaccataaaatattcctacactatttcgaattcatcttcctcagcctcacatggaagtttgtttccaattaagcaataggaggtttccaaacaaataaggcaatttatatgtagggaagtaaaagattctgacagactgaactctgatgactcaaactcttatttgattctgaaacagcagtataacacaattgaaaatgattcaatgagactttcacatcttagtcttccttttctttgtggaagacattttcaaatacaaattcatcaagaaatttttgtcttgaattttccagtaggagtccaaacttttggtttatttttgtataaatttaccaaaagtggtagtctattcttctattctcaggccctccattcctagcagtgtactattaggaatcgggttgtttccagggcttcctcaaagtcttgcctttgtaattgagaccagagtttcatgccaaccctggatgtataaaacatcctccaagcttggaacccagggttgggccattttccacatagcaatgtggaagctaatttgttgtcactcaggaaccattatgtgccccttggtggaatcaactttctcttgtagagtttcttatttggatctcatttctaatctatttttataaaatggggaggcttttgtctctaataagaggataattttccaaatagttatgttgttgcctaaacctttcatgtccagtagaacccagaaagacttctatttaacaacaacaacaacaaacccctgaatatcaattgtatttgtttgaatcctctcagaagtaaagatgctgtggaattcaaggtctctgaatctaagcataagtcctatactgtcaagtctgtgttgtggtgatatattgtttgcaatttaataaagtttgcctggggatcagaccacactacttagccagagacagcaggcagtggtggcacacacctttaattccaggactcaggagacagaggcagatggatttctgtgaatccaagaccacctgggccacatgagtgtgaatcagtctaaaagagaaacagagctcacacctttaattccagcactagagaggtgtataaggaagaagcaaagggtctcatgtcagattcagtttccagtcacagggaagataggacctccatttcagccttggtagaggtaagagctactggttggctgcattgcttttctgatcttcatctttaaccccaatatctgtctctgggtttttattatttgtgtcacactgtgtcttgtggtcacttcatctctttagttcccccctccataaaatgatggttatattggaactaattttattgacctgggggaaatattaaaagtaagataatgagaatcaagtatttagcacactctactcagtagatatgtttgacaaattttatgctattgtcacacaatggggcttctttttcaaacatttagtttttagaaatagaaaaagttctgagaaaatccatagtctgtaagaactaccaacacatcttttgtccctataaatactcatatttctgctgagaccttgctgtttgtcaagtcattcacaattgtttcctgtgtacagtatcccacagatacagctatttttctccatttattataaccaagcaaaactcttccagcaaaaagaaaaaaaaaaacaagaaaagggaataaaataaaactagaccaaaataactaaatacacattttctcttttccaagtattttggcatcttgagactagtgttcataccagttaaaatgaatgttttcagagatctgagtaaagttcccatcatcacactgggttatacttcttcatctcactgtggtatatatacactacacactgtgccattagggtgagctgttggttctctcccaagattaatcttcacgttaaaagaggctggagagttattttaaaaacattttaaaaaatctgaatagactctaggcaacatattccctgtggtgaatagaaacactgtgagccagggaccagagtgtaggcctttgtaaaacaacaggcgttaaatacaccaacaaatgccactaacaataagtaataagcactgtctaaaaactacctcaaaggtttacacaaatgtatatcagggtttacatcatatgaccctgctgtctattctgtcctgttgtgagacagccattccagatgaaaaaaacaacagtaacagatagctccttaccttatagcagtgagccatgttgtcattttgactacaatgggattaatctgtctgctatttcccatatgtttatctcctagaaaactccttatcaaggtctaatcagaattaaatgtggcatattttctcttcggatacttttctagaggattgaagaataaatgttgaaggtgcgccaaaagatgaactgtgatccgggatggtaaagtctctttattcaagaaaacaccggggcaaagcgcaggccagagtgaggttacaggaaaccagcaagctaggccagaaaagggctagggtcttccggtgccgcccttaagaagctcccttacatcacaccggctttccttcaccacgtccttatggccgagtcccgggtccacctggcacctgtcccatgactattgggcggggctagggtgtctccctacagaggatgcttcactttatacttattatattaaagtttttttgttgttttgtttttgtttttcttttttgggaaatcagtgggtttgttgactggcctgtggaagcttctggatttatcattagcaagtacaaatatataataagtagtttataattgtacagtgagcatgcatatctatatatgatggctcatatgacttataagtcatatgagtaacttgtgcattagatataattcatcccacccctgacaagtatcttcttagcattttcttttctgcagagaagatacacattttacaaagaagcctcctgccctggcagaagctggctaatttttagctcttatattgggtagacaaatttgtctctagaatatagtattagaaagtcctcctgcaaacagatagctcatgcaggggagggggctttatctcgttattttgaatctgtctcatgatggattttggacttgggcagaagaaagaaaatgttttttatttttattattacttctgcataaacaaaactcaagatttggttctttgaaaacatcaacagcatcaatctttagcccatctgagtggggaaactcaaattgttaaaattagagatgagaaaggagattataacagattctaccatcagatctgaaggatcattcacaaatattttgaatatccattttctaaacatacattctaacatattctaagttggaaaacttagtaaaacaggttaaactcctaacacatataacctgccaaaattaaatcaagaggatgtaaacaagtcaacagattcaaagcgagcacaccagtaatgaagagtctaccagcaaagactagcccaggacctgatgaatttacttctgtgtcctactagaccttcagagaagacccaatgctgacactcctcaaactgttccataaattataaagagaagggccattgcctaagtcatcctattaagtcatcaccaggtaagaatataacaacaaaaagaaattatactaaaaatgtcccaaagattccaccataaaacttttattcatgataagcactttaagaaaatagcaggatacagtatcaacacacaaagtcggtagcctctttatatatcaataatgaaaatgctgagaaagaaagagaagaagagaatcccacccacaatagctttacaaaaaaaaaaaaaaagccaaagaacaaatctaagcaagaaggtaaaagacctttacaatagaaagtttaaaactctgaagaaagacattgaagaagaaccagaagatggaaagaactcccatattaatggattggcagaattaaattgatgaagacagcagtatttatgaaagtgatttacagacctgatgcaaccctaccaaaattccaatgatatttttcacagaaacaggaaagaaatcttattcatatgggaagtacataagaacctaaatgcccaaagcaatcttaagtggaaagagcaattcttagaggcatcacagtatctgatctcaaattatacaatggatctatagtaacaaaaacaggctagtactggcataaaaaacagacacatagagcaagcatagaggaccccaaaatacagccctgtacttacagtccataagtgttaagaaaagtgttaaaaacgtgtatagggagaaaagcttcttcagcaaatagtgctggggaaattcacaggaacagtagtgaaactagatctatatctcctaccctacataaaatggatcaaagatcttactacagacctgaagccccctgaaactggtaggggaaaacacttgaaggtttaggtatagacaataacttcctaaaaaaggattctaataaactggaaataatcctaagaactgacaaataggtcacttgaaattaagaaactcccagacagcaaataaaccatcaattgagtgaaaagccagtctacagaatggaaaaaaatctttcccagctcttatccaatagggaattgatatatggaatctataaacaaaatgttgtatccaaaaaattaaataccccccaaaatccaaatcattcagtcaataagtgaattaagcagacagttctccaagaaagaaatataaacgccaataaatatgtgaaaaagtatttaatatccttatccatcagagaaatgcaagttaagatctcattgaaagttcatctcaccccagtcataatggctatcatcaagaaaacaaatgacagcaaatgctggtatggacctgggaagacagatatccttatatactacttgtgtcaatggagatttgtgtagccactttggaaatcagtgtagagattactaaaaaaaaaaaaaaaaaaaaactgaaactataactactaaatgatctacctataccactcctgggtaaatacacaaagaagtctaagttagcatactacagatgtatgtatacatctatgtttattgccacacttcataataactacacatgcccatcaaacagatgaatggataaagaaaacagggaaaacgtgcaaaatacaattttattcagctgcaaagaaatgaaatcatgacttttgcaggaaagtggatggaactggatatcattatgttaaatgaaacaagtcagactcaaacaccaggattcctctcatacatagaaagccaacttaaatctgagcatcatatatatgacatgcaggtggaaagggaccactggggtggggatagttaggtctaaagggagcaggggggataagagaaggtaatggaaggtgtatatactttgagtggagcagagaacttttctgggaggtgagatggggagggtgggggcactagcaatgggagcaaaccataaagatatgaatgtgtgaaaatgtcacaatgaagcccatttctgtatgcaataacctacttcgaaaaaaacaaaacaaaacaaaaccccagccctttaaagctctgaatttcagtgttgattgagctactagaattagtcagttattagattacatctcacctggtctcctctatgcctgtggggttggcattgttacctccatcttacagaagaactgagatgacagtcatagagaatcagtaaagggtggggcttaaggaccacagggcctggaccccaaagttcctcctcattctgttctgcaggggcatgcaaatagttggtagaagaaacattatcttttctggagattaaatatttcaagccaaacatgcaaaccaagggaaagttgaagtgctctggttgttgcatgggtgggaaggggtgtgctcaagggctactcatctcattctcccacttgtactctcagtggtaaccctaggtatgtctttgtggcttctctgattacagcttgcaagccatggcctctctgagtttccaacctatcttctcaacgagatttctcatgtgggggtaggggtgggggtgggggtggggatgacccaaggacagttctcggtttcaaggacaggcataggaaactgccaaccagcagccacttggagagtcagagctctgttttggatgctcctgacctgagaataccctggtctagcatgccaggctgggaagaaaaatgacctgtgatgacagcacagtcctctaaaaagtgccactcagtccaagctaatcttgccaaacacagagtgttgagggttgaatggtaacaagggcacagcccaagaagcctccaccttgctgttggacagggacaggaacacacgaagaacactgcgtgattcagatggaagggaacgaaacgaggaagaacaaatggtcccatgtgcaattctttccttttatacaagtgaaaggtctaatttacgaatcctgtaaacactaccgactgtggaaagatttggccatatggaaaggtttcctactgctgtcttggctggggggaatattcagaagtttggagtaattgtcagaaattagtcacagcgccgttgcaggggatgaagtcagcattgcagcccggtgtgggggtggagttgccttcaatcacaatgtttctgtgaaggttttttttccccccctcatttcctttctgaggagaagaatttctgaacctttctagtaaccaagtctttgttcagtacctaggaaacatcatgtttcagaagcctctgatgattatagctctcattttagacaggctttatctttcttgccttcattaagtgggggcagcccctttcatcttggtgggttatccatgtacaggctccagaatttgtttgggtttatggactaaaggagtggtgagctactgggttcgtctgcacccttgctttgaaaactgacaaaggactcaattgcttgattagggaatagagaagcagaattcataggtttttctagaatagtaacccccagagataatgggtcatgttagtattaattttgtggtatatctcccccaaatttagtggttgaaattaattattatgccacaagagtcagatatagaaacaggctggcagaactcaatgtctcccatgaggctgcagtcagatggtggctgggctgttggaactggatatccaggttggcttgtgtatgtgcctggcagctggcactgtctgttgactggaaactcagttgagctgttggccagaagcctatgcacgtggcttcagaggcacagaagtcccaggggcactagagttctcccatgggggtataggtgggctcctcaagaataagggactgggcagaagcagcgtggtctggcagtcgcagagcttgtgtctcatggcttctgctgctttgacttacttgcagcagagtctcacagaggccagattcaaggagccgaaagtagttaacatgtcttgatgagaggagtgccaaggtgtttctggtaccaggcatagtctcctgagtgagagtccacagagagttatcctttcccacttgcactcattttggggggcgtaagtgcccagttttctctaactttcctctttgtccagtgccaagggaagaaactttatgtggtttttctctcttttcctctaaattcttaatttaaaaagaaatgtatctcagctgtttacatgtgggctgacaaatgtaccgtgtgtacagtcctgtgatgtgatgggttcctggatcatgagctcacgatccagctcagtgaggaagaaagcctgttttagttcatgtgtatgaaaatgtgcagcactattaccaagccagtgcggaaaacaatgctccttgaagaagaggagactgaaagattcttatgccagaggctggagaagaatgcttagaaataatgtcttctggatgtgacagagccattatagtcattatagtcaattgtcagcataagacacgcacaaaatcaagccataaacatgccagtatgaacagggaatggactcatgagctattggcagttgatggccactagaagagggacagtcagttttcttcagctgtttgtaccctcacgtaggggtgtatgtagctatgatctacattcatcgtattcattgagaaaaaataaaatttaagaaaaaggacaattctattgggaattgggaatttctgagacttgaggaaggatcatggagaaggaaagcctatcaacccggatggggctgactgtcaaggtgtttctgggctggctctcacacacccctgggtggagaagagcaacatagagattgaatcacaatttttaactttctgtattttatctagaactctccctggaagggatcagatgttgacagatactatggtgtaatgagaagtctttctgacaaagccacccaagccttgccacctcatgggcgctttctgccaggccacccaagttccacccaccaccatgttaaggtcccaagtaacacagagagacttatattaagttacaatgctgctggccaatccctaggatttcttacttgctagctcagtcttaattatcatccataatcataagacttatcttatggagaatgctttccgctggtgtcctcttcctaggtcacatggtgactgcagagcagagagcaggaagagagaaaggaactacttccttcttgaccttgcttatatatgagtctccctgctatgtcacttcctgcctggatcacaacatttctttactacatttcccagaatcctccttgactcctaacttgcttcttcattggccaaacagtgctttattcagcaatcaataagagaaacatacacagaagtacattccccatcatctcctcttctgtctaaattaaaagaagggtaacttatcttttataataactgaagtaaactataaccataactatctgtcttcaactccataaaagaccacagaaggataatacataaactctagaattgacagagacatatcactacctggacagtcacccaaagttcctctgtaaagttggggcatccatcttcagcccataggccacagtgtgtctgtaggggaggctgtagccacgcctacttaggggctggctataggtgtgcctgaccatgcttgtgagggcgtggtcggggtgacatagagtaagactttcaggggactgtgtttctctttcggtttcacttttgtacttgctggacagactgctgccacgccggctggctaggttgctctgtaagtaaggcttttccctattaaatacccttatatttctacctgactccgtattggtaatttcccactatatgtgtctggcacacttctctatttcagcaggaacccttcaggactgttcatcttgttttgtaagttcagcagtcactttgttgtgggtcctgtatgtacagtttatacagcaacaaacagtccaggcaagagcagtttcttgcccaaatggctaatcttgccatacctcaaaggagtcagaccaagtttgacgagcagatgatttaataggagagtattcacgagacggagtcagtcccctaccaccagtcgaaccatggaacagagagagccgtctgaatgtgaccctcatgtttaaggtcttgctatgtcactgaccatgccccagtgtgcgtggtctgtgtcacctgtgccagcccccaagagggcatggctaacatttcccctacactattggtcaagaaaagcaagattcaaagtttactgaggttataaactacttcaaacaaacaaatttctcacctccatgtctcaaatccatatacattgttggcaaactgcaaacaaattaaggagactagagaggtgctcaaagtccaggctgactgggcagttaagtgggcacacctattttcatttgctcatctttgctgtaaggagttactgatagccttgaagcaacctcccctgaaaagaatattaaaacaaacaaacaaacaacataaaaaaaacccaaaagacccacaaaactcatacaacctcttcactcccccatctttcctgactctccaacacctcttcatttgtcttagtgacaatgggggctgaattgtgtcgcacagtatataccctttggtccaatcaactttacttgcaaatgttcaatgcaatgagtcattggtctggttcaaggcctctctggcttctagcacaccatcatcactggacccttaccaaaactcctcttggatatcccttggctaccagagtcacggagtcattctatagggccagtcccttcacacacttcagtgggtcatagatagggtagatgttagggtgggctaacccaaggccctggatgttagttaagttacgtgttagctaagctggtcagtccgggcagagccagtcctcctatgcccatgccatcatcgtcagttctcccatgcccatggtgatggtggggccatatctcctgggtttggagggccatgggacattggggctacctatcccatgagggttggggccagtcctccagcggcagtgtccagtgaggagcaggaccagccctcccagggccagtgaagggtggggccagtggatttcattgcacatggttcctatggccccctgtggtaacacaggtcacaggaatcagcacagaccccagctgaagcaggaccagacatggccctcagcagtagctccagcttgggcaccaccctggcccctgtggcagctcaggtcacccagatcagtgtggtcctggtggtagcttggctcttggatacgaacatggtctcaggtgactgaccagtgcctgggtatccacatgaccatcagtggtaacaggagccatgagaatgaattctgaccttggctgctgtagggccacagacccagacatggccctcagcagcagctaggatagcaccatggccccaatgacagcacaggccactcagataagtatgccacagctgcagcatggctcttagacaccaacatggcctcaggtggcaggccagatactggacatacccactgcctctggttataacaggagccaaggacattaactcagaccctggcaacagtaaggacatggacgcagacatggctctcagttgcagctctatcccagatgtgaccatggtactaggtggcagtgcagcccactcagatccatatgcccccgcccccccgtggcagcatgcccaaggacaccacatggccacagatgacagcccagacactgggcatccttgtggcctttggtggtaacatgggccacagacatcaacacaggtcctggctgcagtaggatcacagactcagacatggcccttggcagcaacctggactatgacggcaccatggccctgggtggcaagcaggccacccacatcagcctacttctcaccgccttcacttttttcttcctcctctttccacgccacgtgaaccagttggcttctttttctctcccattcctccaccacaatttgctcatggtaacagcacccacctgtggatggctagcacccatctgagccaaatggcatgaggtgggctcatagatgtctttcccaccagctcaagccatgagaacccacactggcctgtagatggctagcacctggctgagccaaatggcatcctttcaatgggcccatggttgtctttcccccaagccatggcctctagtgtttactcttatgcagatcgataatgaaaaggagcaagctgagcaagagaaaatacaaaatgtagagattgaggagaaaggggcaccaggaagtagaatggagttaagtcctgtgttcaaggggataaacagattaagaaatgggataaaaggagtggtgacctcagggcaagatcacatccagctatgcttccaaattgtgaaaaggaattaaagaacagcttaagtccaaacatggtggtacatgcctttaatcccagcactctggagacagaggtctggtctacagagtccaggacagccaggctcaggtagcgaaggaaaccatcttaaaaagaaagctgatgaagatgtaattgaatgaggaggccatgttctaatctcagcaagcagcataacttggcagctttggctacgtggttctggctttggggttatggaatctccctccatgactaaagaaagcctctgtggccaggtgtgtgtgtgtgtgtgtgtgtgtgtgtgtgtgtgtgtgtgtgtgtgaatggaggcccagagaggccactatgtgaagctgtgaagttgaagcctggattgcctttgagatcccgagatgttggagatgccaatgctgtgtgacacctgccaagaagagctgctaacagggagggcaaccagcttaagagagagatgtgtgctacagacaacaaagctgaatggacttgttgatgtgaagatgctttgatatcagatatgaagatgcagagtttggagtttgcccagctgggttttggtccagcattttcctcactatgctcccttccctgcgttttggaatggtaatgtatgccctgtgccagtatacgttgaaagtatgtggtctgttttttttttttttattttgattttatagggaattgcagttaagatgttatatgaatctcaaaagagactttgaactttgaattttgaagcattgttgagaatgtgatagaccaggaggacttttgaagttgaacttaatgcattttgcattatgttatggctgcaagcctaaggggactagggagtagactgtgatttgaataggtgtggcccccatagactcttgtgtttgaaagcttggctcatagcaagtgacactattaggaggtgtggccttcttggaggaagcatatcactgtggggtgggctttgaggtctcatatgctcaagctacatccagtacacagtctccttctgctgcctgaaggtcaagatgtagacctctcagcgccttctccggcaccatgtctgcctgcatgctaccctgtcctgccatgatgataatggactaaccctctgaaactgtaagccagccccaatgaaatgttttcctttttaagatttgcagtggttatggtgtctatccaaagtaatagaaaccctaactaagacataagtcatgtttcaaaactgctgatctgtcatcttttggtccagctgctgtctgctgtctaactgatctacagtccacagaggctgtataggatgagaactgacggtgatggcatgtgctgttctgtctcacaagccttgacaagcagatagtctaagcggcaagtcgggagaatatagggagaaaatggagttgtgacaatataaacgctttctacttggaacttttaatctgtgtcagttcaaaggtcataattcggaagtgttcaagctcaaaaagttagttttgtagaacaaaaaacaatttatcccaatctctaaacacagggaaaagagaaatctacgtagtgtgacacaagttaccccaggatgagagtgaatctgatgtcccccaccgtgcccaccattgcccttcagtaccaggaggtatttctgaagggctggtggaaaggcttcattcttcctgtgtctgtgagctgctcctccgagtctgacacaaagaatgcaggggtcgggcagtggtcaagcagctttctacttttcgtgatggaaaacattgaacagttgtgatttgcatccttagttttacaggggaccaaaaaggacaactgttggcattgggagggactctggtgggagttggtatcacaacactgatgaacagaggtttgccaggaaggccctgcaggtaaattactttttgcttgtttgataaaaatgagaaggttgtcttccagaaattatgatccaaattgcagctaggggctattggtctttagagtcactgaatgctatttgctgagacaaacaatatgtggcctgatgaggcatttgagaggagatctgtgccaggttttctttttagaaaatctgtttgaacaaggacaggaaggaagtcattggttgttttttcttccttcacaggaggaagcagcttgtattttcacttgagctgagcaacaaataatctggatagcactctaatcctcctaaaaccaagcactatctagtaaaagactcaaggcagcatggctgaactagatctcccaccatcaggatggatttgttaccaggagaataaagagctgtctcctagcgccacagtcctgatttctagcctcctttatgtaagtaaaaatagcatcaaaaattcaaagctggggttactacagagcaatgaagacaagcttgagccacagacatcgctggactgcatcttaccaacaattaggccaggcacaaggagagcaaacatcctccatggagcgcctttaaagtcctgcatgaaacatgcgtcagcaaagggtttatttgaactcacaatttgaagtgcacagttcatcatgacccggacgacacagcaatgggagaaagaatggctgaatcctagccagtaagcatcaaccacatttttattgcattattattatttttgtgtgagtgcacaagtcacatgtgtgtggtggccagcagaatcatttacaggaatcagttctcccattaacaatatggggcagaaagacagaactcaggtgttgttgctgggcagaagtttctttaccagctgaaccatctccacagcccgtagcaaaagaggaatattggtatacctctcacttcctgcttttttttttttaaactgagtccaggaccctaacctgtggacgaatgccacccatattcaggatctttccacttcagttacagacatagtcatttgttttctaggtgagtctaagtctggtcaattggacgttgaatattagccctcacagtattccattctgttccatcagtttgtgtccatgggtagtcaataccaaactgttgtgttactgtggctctacagtataatttggggttgggttttgtgaaacttcaaacattgcccctcctaccccatgcacgcacaggattgtttgagtgatttaaggtcttttgtacttttgtgtgacttttcagattgtttctgggaagaatgtcattagtattttgatggtgattgcactgaatctgtaaagctctagagacaagacaggaacatggccttttataataggaaatctgtcagtccatgaatatggaaagtctttccatcttctggtttctttttcagtttcttccgtgttttgtggttgtcattgtagaggtgtttcactgctttggtcaggctcattcctaggtattttattctctctgaggacatcaccaacgccagtattttcactttggatggttgttattggtatagaaaagagctcccgaggcctgaatgttggttttgtgccctgctactttgttgaatttgcctgtcagctgtgaaagtcttccagtgggaatttattttgatgctatggatggaagccaggacctcatgaatgtaggcaagcactctaccactcagccatggccccagccctgtggtgtcttcagggttttctaagtatagaattatatcatttgcaattagggacagcttgactttttcttcccctgcttgatatcctctttcttttatttgccttattctcctggctaaaacttcaagtactgtagtgaatgatattgctgctcatggacattctgtttcattccaggattcagaccccccccccccaccattcagtatagtattggctgagggcttttcataaacagcctttattgtgtttaggcaccatcatttgatgcctattttcccctacagatcttgtttccttctgagtcttcaagaaggctcagagaatgctgcttgcctcctgccaccacccgggctctgctcctgttctgatccctggtccctctgcttgtcactgaggtctgtgcatgtcatgaatagccatgattgtgtagctttatacataaaatgtatcgtcttcattgcagttcaataaaaaaatctactaagaaaatataaaactcaccctttgagaatatctactaaaattcacatgtttaaaaaagacacgagggggctggagagatggctcagcggttaagaacacttgctgctcttgaagatggctgctgtttggttcccagcacacttatctggcagctcacaacctgcaactgtgtctcctagggatctgacacctaccctgatgatgagggaaccaatgtctagacgtcatgtggattgtcagaggtcacactgaggtaatgatagtaccggctttggttctgctgccgatttctacagttttcaattctcagcagagaaaaacagacaagtggaaagctgaagctttcccaagggtgttcctagattacggaaggctgcaggaagccatcctttctgtggcccattgttgcagagaaagaaggctagcccgcctaggggcttttggaatcttgccctcaatgttcctgtgcccacacaaagttctctcatttagaaaccgtgctttttgcagaatgtttcaaatggaacaaatgcacatcaatcagcaggaagctgcaatcagcaatcagctctgcattcatgcaagcaggtgacccagaggctccagtcatgtggtgtgtttccccccacccccaccccgcccatctcccagtgaatgcgccagtccacagggacaccactcagtttcttggaggctgggccccaacattctctgcttctagcagcctttcagagttctttctcttaagggtgcaggtcagctagagattgactgctggaatgatttttactctttccgaggtaaaggagattggcaaagttaaggcgatgaagcgctttagtcttacaggttgaggtgctttccagcagctgggtttacaaggacctttaggctggcctctggtaaatccctggatttacactgcatcccttctttttacaccttcaagatagatctgttccctactgtttccctccaaaggcaatagaactattgcaggttgattgcgccccctacaggccagggctggggtactgcgagatgcaacttgccaccgatatctgactccctgtttgcctccattttcttgggactccagctcagatcagatttcttgactacactttttatctcccagtctccttctctctcccttccccctctcccttctccatatgagcacacactagtaaggccctcaaaagcatgtacacatgcttttctttttaagcccccacacatctgagttctgactcagttatgggtggaggtatttcccttcccttttctttcgtttgtgttgtatgtattttcctctaaacacatctgaagaaaactcatgagtgtcaaataataactctaccaagggaaggaatcgtcactggctttgaagtagagttgagtgcaagcaacaaaaggaagtcaggctcctggaaggggggctctatttacagtttgcatggaactgaaggcactattgaattttaaagtactgaaactagggcactctcattgaaacctctctggtgaagtcaccttactccgacaacttagtggggggactgaaggcttgagctctactttgaattttctctattcagtgacacgacatggaagaattctgactaaggagagagaagagagttagggctcttacatggtatgggcatttggaagagacccacactcacacatttggggaggtagaaacagcaactgttttaggttcgatgattttgaatcattcatagtaagaacttctattaggtaacataaaaagcaacccagagcctttgtcaaataaatattaacaattttcatttgtgtgttattttatgatttcttatttctctaaacagcatatgcatctcatacaagctaaaagatagataaataaagatatttattaattggatgttttcacatcctcttcatagtaacactgtacttatggtttatcagtttgataaataaggaagtggagcctgtgagagggagatgagctgcccaaagtcaatggcagagaaagctatactccctggtctctgaccacaaagcctgtgctctagttcagttctagtttgtatgtgtgttcttgggcacagcaacacattgcttacaatttagaatcatctcctcattctcatttcaacaatctttccagtctgtggttcatccctctttatggcttagatttttgttctccttgccaatgtcctctgtatattttccatttggtcaatggagcttggaattgagcccttgttaccccaccagggtgcctttgtggggaaccatgagagagagagagagagagagagagagagagagagagagagagagagagagagagagtccgcaatccctagcagtaagagctaggaacctggaaccaatgctagctacagcagggaaccaggggcatctggggcaatgctagctactgtacttggagaaaacacaggtttttttttaatctgttctgagtttgcttttcattgttttgtgtttctaatttcccaatcctggaaatgaattcaacaatacacagtagatacaatacacaatacatagcaaaaaagtgaaagcttacttttccacacttcctgtggaattcagctataacctttctattcacaagaagcactcctatggactttgaaaaagtaattttcacctacattgcatgagatgacattaagttgtcattgtagtttacggcaaaggtgacagatttcctttttaaatgtagatcgtaagtataaaggagtcaatactaacatagtcattcatattttattttcattagtttctagcagttcaattagcagatttccttggctctaaatagggattaaggtgtgcttgccttttctattgaggactcactcatttttcaggcaggcactgtttcctgacccctacagtcactcaacgatgaactctagacaaaaagggaaaacagggcaatcaaattcataactaaaacctgtaggagctgatgatctctaaacccagaaccatttggtccaggtgatgtggactgacatgtccccgatgtttcctttttctgtttgtccccaaagtggaaacctgtaaattctgagatcctttgacttgcctgctttctctctgcgccctcaaactttagcatgacctccatgatgtattctcaacaccaaggacactgcctgatgtgcttcattctccagtaacacaaaaagaaagttacaaaggaacattcagcggtgggtatgtagcccagcatcccatccaaacacaacagcaactacagaatatcatttagtacatattaatttttgaaggtcttgtttttctaaactgtaatctattatatcctggtggttttgcttctttcttctaaatagattgaatgccttggttaacagtcctgagcattaattatgggggctgacagcacatgctttcgcccttgtttgttgcttgccatagtcaaatgttcttttgtgatagctcacattttgaatgagttaactataaactggcatctagttttcttaagaaaacttttgctttgtgacctaaaactttatcgtttggtaattttgatttttttttttcaggcttgagttttctacccatttatcataagaaccattgacatagggaatgacagcctcagttcagggccctctagatagaggcagagaatgtcaaattcttcagttcaacaataaagacccagaatgatgagagggatggcaatgttagatttgttaaaatggaattttctctacagacagatctgtcggaagactggagcaaaacagtgtcttctgaacaccacaggatggctgctcttatgaactcacagacctgcccaagatcaagccaggcaacattccagcattttgtgggaaggagttcccaagttcccaccctgaggagctatggacaaccgatgatttctgggctagagagaaacaattttctctaagggccacacacagcccctggtaggtggaccacgctccagtgggtggcaccccaccaaatatatggacaacacaaattggaatcagtgggccattatgtacacacacacacacacacacacacacacacacacacacacacacacacacagcacaaagttgagaaagaaggatgtggggagatctagaaggagttaagggaagagttggaagtaaacgtgatcaaaatacactgtatggaattctcaaagaattaaaaaccatttcaatagattttttctttctaaaactaggtactaaatgctactatgtgcctgttactactctaatcgcaaggcatatgacagtgaaaagagaaaacattgcttgcatgcagtttacatcctagtgcagcaagacagaaaagcaaacatcttgtttacacattgttgtagcttttaatttaaaattcttgttttttattatgtatgtatgcatgtgtgtgtctgagtttgcatttgtgcatacaagtgaaatgcccatggaggccagaagagagcactggatcctgggaactggagtttcaggcagttgtgagccatggaaggtgggtgctgggaactgaaatcaggtcctgtggaagagcagtacccactcttaactatctctgcattcctgctgcatatatttacagttagcgatgtgacccttttgcatactccactcggataatctacagggatacagaactagagacgcctacgtactcacataattggcttttgagatgaatgggatggaaaccataaggccttttgactacaagcatgaaaatcattttcctaatcactctgtactccttcctcaaagacaattattctcacactgtaatggtttctcatactgtaatggtttttcacactgtaacagttttctctaatatgtactaataggttcatggtagggaggaatcatgatatctacataacactacactgtgctccttcccctttagcaagatagtaggtacaattctctcactggaacacagatgtgttacattctttatgtcccagagttcgaactcattaatcctcttcaggtgttcatttacatcacctccgttatcccagtatatgctactgtgagtttcatttacattacacacttgttatgatggtagtgttcctctaagctggaattcttcagctaggatgtcttgatacaagagcatgcacgtcatatttatttggcagtgaagtaacttgcaggacacataggaaaggaaaagagagttgaggattcctaaaaggcaaaatgaccttggaggggagaatgcaaacccagtggaataggagtgtaactgtctacagaacgttatcgtataatccgttagcctctcatgaatcagaaatgtcacccacgggctcatggactcgaacacttggtccctagatagtggtgttgtgttgggaagttgtgcaacctttagggtatggaacctaattggtagcaattattcactaacggtggacttttgagggctatactcactcctggttcttggccatgccctctatgtcctggttgactgcacttggacaagcatcagctgtgtgctcctatcagtacggatggggtcacttcagcctcaatgtctcctccacgtcttccttgaactgtctaatcaggggttttcatcagtcaagagggaggtaaccaatgcagacatcacaagcagagatgggctggagtggggtggggtcggggggtatcccaggtgtgcagcagctgtaagtaagcgctaccctatcctctagtttctcagcttctcttcccatcccaacagccacctctggccagagaagcctgattgggtggtatttgcatcagggagtatcaatctcctctaattgacgctcatgcaactatttgtggtgttcctgtgtgtgtgtgtgtgtgtgtgtgtgtgtgtgtgtgtgtgtgtgtgtgtaacacaaaggtttaaaatatgtcttccttggtcacttggcatcttatttttttgagacagagtctttcattgaacctggaactcacctattaggccagattgcctcgtcagagagcccacctgtctctgccccctgtccctgagtgctgggcttatagatgtacatcaccatgatggaatttattttacaagggtgctggggatttgaactcaggtcttgatgcttgtatggtaaatactttatcaactgagccatctctccagtccttacaaaaatgtcttggaagaacaggagaagacatgccctgtgttgaggtgcttgcgagggcggtgataggggttggcgggtggtggtagtgttggcagcgatctgatggtggtagtttcgatgattgtggttttggaagttattgtgagctatcaaagaattccccttcctccatccatacttcttttcatcttagatcttactgacatttccctgggggcccttttgcgtcttctagtctggagttctgcattagggagtgcgcaccatggtatatttggtgccggtggggtcagaagagagcattggatcacctgtaactggagttatgggtggttgtgagccaccacgtgtgtactggaaatcaaacctgggtcttctgcaagatcaacacatattcttcagtgctgagcaatctctcctacccatttcctgcttttacataacgctggtggaacaatgggagcaggaaggtaggtcctgcctccaccactctcattacaggagtcttatcccaagtgggcaatgcatttatgaactgaagggatgctcactggcatctctcattcttaccacatagatattctcaagtagagatggagcccatgtcaatcaatggacagtgctgaaaggctcctgcagtctcagtcactgtgaaatcagcttcattcactactgtttacttctggttgtggtgcaagttagatttgtcacatggacaataccctgcagtggttttgaggaaagtgctatgggagtaagacaaagtgtggccaaatgtgcttaacaggacacaagttgtgcagcaggggaaacagggtactctaagtaggtgcaggggtttgtttgaaaagcagggacttctagagacaagaggggcttttgttgggcacaggtaatttcagggtttttctttgaggcagggtttgttcatggtgtctaggctcgtctcaaactactgggctcaatcgttcctcctgtctcaatctcctaagtggctgagacttcagacacacatcacttctccaggccagggcatttcaacagcatcaggggcttgtagagaaaagcagggcttcgcagggaggtgttaagacaccagagagaggcatggctttgaaggagaagtggatctcgtgagaagcagcactcctggaaagcagaacttctagaaagcacaggagtttggagcaggggacagcttgctaggaggaaccaaggcttcctaaggagcaggcaaggtttggagaaacgagcagagctttaaggataggcctaggccgtgttagtgaacacggcttccttggaggatccaggccaagggtgtgattagggtttcctaggaggaaccaggccacacaggaggtctgggactttgtaggctatgtgcaaagtcagctggcgattaggagaaagagatatacaagaaggattggagccatatggagcaaagcttttcatataagctttgaaaaaggaacagcagcttcattaagggagtggggacctgtgagtagatacagtataaccttgcaatggacagtcttataaaatgcaatctaaaactccaggaaaccccacaggtgaggccagcttgcagcctgggcacctgttggaccccccccccccccgcccccaatagacttctcacaatcccggttgtatttgcatacacgattaaataagtgcacatgcacttactttctggcttttatcttttctctaagttgcaacacgactgcaggaaacacaaataagaaagcttctcttcccaggtctggcctccaaatgatgaacaagctcacctccacttaccatcgtctcctggttttctcctgaagaggcagcagtggacttcagatcccagtaagttaagctccaccaggagcagggcttctcaggaggggcagtgtgaggagcagggctcagtgttgaggactgtgcttgctatggaggagctacttccagaggaggagtagggcttcatgaaagcaaagtctggggggtcggggatggaggcagcagggactccacttctccaggagcagggttgccaatgacagggtttcctgggtggcacagagcttcctgaggaggaacagagttcagagagaaaagcagggctttgtaggagggctatgcggttttgtgagcagacagggcatcagaaagaagagcctatcttgtagggcacaggcttgtagcatcagcagtttgttccacaggggtgcaggctaagagggctggcatctccaaggagggactggctttggagaagcagggtactgatgattcaagctttgagggaaggttggggcttgttaaggagggtagggggttcacatagtgagcaggtaaggagtggggttgtgttacatggaacatgcctccacgggaagctcttgtggcttcagaggagcaaggccaaacggttatcaccgggctttgagggtagacgggagcagtgagagggatgctgtactggctagggcttggaagaggccttgttaaagaggtacagggaacttactgaagacagctctagaaggtgaggacctgggagcgggtagcttaaatgagtagggctgtgtaggagcaacaggttcataaggagatcttgaggttggaagaaacaggactttaagaggaggaagcctgagttgcctgtaagagcagagccttatagagagagtgggtcttcacaatgagggtagtttgaaaggacaggatagtttctttcattgtgtcacagcctacttagccttgttgggcatgattccccatctggtctctaggatagctactctggcaccaaactccacagcaggagtttgaatgctaaggattctttgacttgacttccagaaaaatatcatctgcaaattcccagatacataagaaacgaactccccaggttcagcccaatcacacgaccctccatatccttctacactacagacaatagctaagcctgtgttgacaaaaccacatagatgtcccaagcaaactgtgaccccctctgtcaaatgcaagtgcagaaagtaatcattggtttatgttaaatgtgttttcctgcttggggcatggctttaccaggttctcccagcaggctaacttctggtcaatgacatgtaaggagggtgaagtgtgacatagtccatgtattccctccctgtgcagggtccttcttgttcttctccatcttgagcatccctggtcaaagtggagaggttgaatccaatcacattgcatcttattgagggcctgggctttattgctaccttcatgattcactaacgtaccactggagcatagggaagagccttccctcctttctctaaagcaagtggcatgcagggtgcaatgaaacacagcaaaaggttgacctcaaagcctctggggccaagatggcatagacctaaatcttcttgcttcttgaactctggcaagtgagcacaaatcccatgtgcccgagtttctttccttggatagtgaggctactaacagaacttatcttagagggctgctatcagagctaaatgatctaatacacctaagagacttaagagtgtcttaatgtccattgtcattgctgtcatccttattgtacatttttgtaaaccttgctgtctccagacatagaagggttgaaattaggtataatccctaaatacaagtcaagcttgtgtcaaaagttaagactttgatctataattactttttctcaagactccctgggtttgaataatttggtttgtgtgtgtgtagacaccagaagtattagttaagggacagacacatctttggaaaagctccttaacactcttatttataatctcaagtactcaataaatctcaaaaaaattgctatggaagccaggtgttggtggcgcacacctttagtcccagcactcaggaggcagaggcaggtggatctctgtgagtttgagaccagcctggtctacaagagctagttccaggacagcctccaaagccacagagaaaccttgtctcaaaaaaccaaaaaaaaaaaatgttatggaactacttaaaggaacattttttaacagtctataccaagtaacactaaacaggcaaacaataaatatgcaatcaaaaatttaataacaaagatactattttcaacatggtcaaatatacatggctaagccccgaattaaaaaaggaaacatatccagctcaatagtacagtcatacagttttatacagaacattccatagatcaacagaaaatacatgagcacaaaaataaaaaatatttaaagacaatctctaagcagcattttctttctgcaaaacatagaccttgtactgattaaatatctacaagtgctttttcctttacaaaaatacatagattcttaatagattaagtcattaacaatgacttggtcattctttcacttcaatttgaatgattcataagctaaatcttacaaccacaaaaaggtttttatttgtattaagatgttaccacttttgacaaaaaagcttaaaatagttactatttcaaaataaaattagcaacataactttacaatatattctgtgctagatttactgtgagggctagtctaagaaatgatcgctgttgagttaccagacacagcaaagtgaaggtacacatacccctcccgccccctgacgctcttgtcctggaccacagcttcataaggacacttaggccccacactcattctgaaaaagactgcaaaagaaaactggccgtcaacagtgccagggtgacctccaaacatgcacatgtgtagaaagagccactcctggtcccttgtcaatacactagactgtgtagagatgctcccagaatggttaatcttcatttgtgctgcagttggttttctattaagtgttacaagaccaaagaaaactaggcctagtatttaacatatgatacatctgattctagattcaaagacaattaagatgaaaacacatttctgtaaagcttccatcttgcatcatgggaaagtggcctgaggataaacacatcagcatgagaatttaaagcaagtagtttgaaaagtttaattcttaccattttctgaaggcccaaacattttaattctactagaaaatatgatggtgtaaattacttgtgaaaatcatattccaggaagagaagcactttcaaatgacccaagaaatactacagcttaacacaatgaaatcccccactgtctaaggacttctgatgtattttattttaatctcaagattttgatcagaacacaccgagccaagtctaacaagtaaatccaaactagtggtgattccaagagcttctaagtctttagtgaatctgacactgttcagtttctcacgaagcagacctagcagacacgctgtgccccttatttctctccagagggtgtacctactgaaaacaatgaagcagacctagcagacatgctgtgtcccttactggttacatacattcaggatttacatagtaaaaacaatgctaacagcatttcaaatttttatggttataatccaaaaagaaattttggcaaattcatatcgatattttgatataaattatctatttctagagaattcctcatccaatcagaggaatggatgagggatccggctcagttgcacagtgcttgtagagtaaactacacgggactatgggccttttcatccgctctgcggatggtttacatctggcagattttaccctagaggtggtacagggaaagagtggcagagtagggcatttttctgagctccattttgtcaaaatttggccacaataaagtggctgctgagaaagggtcacttttaaagaaaaaaagtcacaggttcttgtggaattttgcttttgaaaatagcaaaagcatttctgtaaatccagtagaatgtgctgtgttgtacacaagcaggcctgccacacctttactgaagcccatcttcaatgaaacttcctattttactaagaacccaggagctaatatggacaacttccttcataccacctccatggaatgaaaggtttcttaaaatgtaagatctcaactttcttttataagtttgtatttatccaactttttatggggaagatatttgttttacttctttctcatatttgaggattttctaagatctaccagatggtgctggaagaaaaagtgaacatatttgaagggaaatatgctgactgcagcaataaagacttctgactcaccccatcaagaaatctcactgtggtgacttcattggcaatgttttagtaagcaatcaaggttgctacctatttacagtcacatcacagtgtaacagtttccatcctctgaactgcacaaactgtctctaacattgttattaacaatatattgtctttggtgatacctctattcttacaactcctttaaaagactactgtagtttgttaattgcccatttagaaatgaatccacttatgagacgggtacagataactggagacttatgcaggaaacctaaaacagaaatgcactttagcaatgaggcactttcttttaaatagtcagtaaagcttaacagttcacaatattatataactcactggttttcttaaggactcgttcaaatgaacctcagtggtcactgtttgtacaatgtgacagatgagtatgaggcagaagcttagcaagtaaagaatatttaaaagttttcaaagaacattattgtagttaatcaaacctcagacttaatataatctccccaatgagccttttagtttattttttaagcttgagaaaagggcattttcatttctctattagctgatgtgatcactgtaatttcaagtgactcttacagaccacaggcattctttattatccaagattccttggtccctttatgtctgatttctaaggcaggtaaaacaggtaataaaatcttttctgtagtaaagttccttagtttattgcttaaggaacaacaggttgaagaataacgttcatttgttcttgatagtatggactcagagagttattcctgaagattatttagacacaggggggctttgttaagcaaccctgttcatgtaaagctggccacaaacagtgtctactcacatttcctacatcgggttcctcacaagggcaactcagtgggaatttggaacatgtaacaccagacaagaaagtggtccacctggctgatatagcagagggggctgctgaaaaggcctgcttccactggcaacatatcactcgtgttcccaaagggcatcagccatccttaatggtatgttttggcacacagaatattgcatcgcagtgaaaatgtcaatgcataacattaagtaaaggactttttataaaacttctttctgtttcataaccatttcctatgtatcccttggaaaacagtcatatgaacaggcaacaagcaaaatttaaggagaccttgtatatatagaattcacctctggccctaagtcttggttggggagccaaatagccacgtctcagtgtgtggctttctgaactcattttttacttgttaattaaaattaaccttcatatttaaaatacacttacctaaatatgacattgtagtatctttaaaattttcttagggataactaggaactaggttttacaaaacatcaaaataatttctgtagttagtaaatttagtttttggtcaagtataatggtcttcttctaagcttccgagtaaatcaactgccttgtaaatcctactcatgagttcttccagaaacaaccaatctaataaggtaagttaaagcattgctgtggccgtctaatacagcaaactttaatacactttttacttgaaaactacccataaactttcagccatttatatgatgaactataccgagactgagctgtacttggtctatttcttagagctgtatttttttttatctctatgaagcactctggacttcaggaagcattagcctgtgaagcattttactagaaaacgtagagcacatgtgttcagagtctaaaaaccaagtgtggaacacactcggtactcttaccagatttcttaaacaagtaatttttcctaattttccctacttctcagaagttagcttgtttgtttcaaagcaaccaatagatgtactccacacttttctttttcaactattttacaagacccaagatgtttttcatatgataagctaacagaggaccctgatttacaggctaatttcaaaatgaatggaagacttaaccaaactgttaacatgaaggacatcaccaatgttttgacttctgatacactcacctttaactcacagttaaaacaataatcacacttccctgtttactaaagtatctaaaataaaatatccccaaaccactaatttgttagaatatttatctactacttggcatttctttcattttgtgcgtatggtttggatatgtgatatgcaactaacaatctggatcagtaacttgggattttggaagtccatgaacgagtgaatgttatctaagatcttctacttaaaaccatcatacataacctctgcatgccacaacacatgactaaggcctgttcaagaaacagtgctttcataaaatggcattaacagtgccatgatgcacacacaacatgggctagacaatggagatttgtaaagcaacacccacttgccctaagacagtaacaaacgttaacatactcaaacattaattttattagaagtcagtgtgatcagctgccaacattatgaacttcagttgttcaagtcatgtatgttttctaagtgaagggctaacacaccttcctgtgcaatggtggagacgacccagacgttcaggatatcgccaattgtaatgtgctctggtcaaaagataactggaattcttcacaaaaggacttgcacactcaagaatgagctggcatattggggttttttttggctgtttattcttttttacataaaagtttaccaagaatagaacagtggctcagaaaccacttttctaaatatactcttatacaaaataatttcaagatataattatactaggttcttgtacagtactctattttaacaagaataaaagtattaagtatgtgaaaaccgcaacaccacaaggattgagccattttactagtgtaattaacattagaacaatcttgcaacaggcaagcaaaatattgagaaagcagagtcacggctgcacacctaagtgacttcagccgtgctttgcacactgtgagacgaaacgagtatcttatgtagatggtcagtagcagaagggcacttggattgctcctagtagaaacaacatggagaaaactgacaatttagagacagacgatggccttatgtgcatgctgaaaatcagattgtgtctctcctgtccacacactgtgcaatctgccgaggagtaaacaaacagtgcagagttcgttcagtgcagtctgggccccttgtcctacccaaaatcaattcttggtcgatactgcaataccatggggtacgactataaaagagaaaagtatgagtaagactgttatttacataaaagcaatcgtttatacagaaaagctttgaagaattggggattacagtttatatttcctgataacagtgattacaaaagttaaaatttcagttgtcatttaagattcaagttactatcagtacctctccctctcctcccctctctatagagggctcgtggaggaccacaagctgcatcccaccagcaactctatgggttgagcatttcagccctgggttctcccagggctgctgctggtgaaaactcaccgaaccacacaagaataagagaccctattctgtgaatgggtgaaactggaatttccacagtactgttcatacatttgatatccctttctttagtatttttaaattaatttttatttaaattaaaaatcttattttacataccaatcccagttccctctcccacttcccatgccctccaccatctcccatcccactctctatccactcctcagggagggtgagacctaccatgggggatcatcaaagtctatcccatcatttggggcaggacctagacctgtatctaggctgagagtatccctccacagggaacaggctcccaaagcccattcgtgcactagggagtaatactggttccactgccagtggccccatagactgcccaagccccacaactgacatccaggttcagggggcctggttcggtcttgtgctggttctccagttgtcagtctagagtccatgagttcccacttgctcaggtcagctgtttctgtgggtttccacagcatggtcttgacccttttgctcatcactctgccctctctacacctggattccagaagttttgctcagtgcttagctgtgaatctctgcttctgcttccatcagctactgggtgaaggctccatgatggcatttaaggcagtcatcaatctcattataggggaagggcatttaaggtagcctctccactactgcttcggttcctagttgggatcatccttatggattcctcagtaccagatttctcgttaagcccataatggctccctctattaaggtatctctttccttgctctctttctctgtccttcccccttgcaggcaaatggatagaactagaagaaaccatgttgagtgaggtaacccagtcacagaaaagtaaaacatggtatgtactcactcataagtggatattagacacagagtaaaggataaccagcctacaatccataaacccagagaagccaggaaacaaggagaccctaagagagacatacatggattccctgagaaggggaaagggacaagatctcctgagtaaaccgggaacatgggggacgggagaggggaaggggaagggaggtaggagaaaaaagaggggagaaggggagggggaggaggacatgagcgatcaggaaggttgagttgggggaagaacagaggagagtaaggaaagaggtacctttagtatttaagatttattttaaaatggtctttagaagtattgaaaaacatgttcctgttacaaataatggtgaaagtctcctttcaatatgatttagtgttcacagctactgcacagcataagtaaagtaaaagctttcactgtccttggtgttgttctctgtggaaagtctctggcagccaggtaccttccatacagttctagagaggaaggggcttcctgcagatggggcagaagccacactccctttccatctgcttcaccttcgcccaccacagagaaccaaatcataagaagcagtcggagagtcaatgattttcctgttctaaatgctgcaggttcccactttaagtgagattcaatgagctaactaccagagaatcaaggaaaggctgagatggtcacaaccaatgttttgctatcttagggtaggtgggtgcaaggccttcagtacagagaactctgtattctttaatatagcaaagaggcagctagagattccacagtcctgagatgccctcttagcacttacatgcttgtcacaaactttgagacttgatgctactatgtcctaacaacagccaggagaggagagtggggaagataccagaagcctgttctcagctgaaggataaagtaggtgctacttctaatctaatgggctagcacagaagtctccgacttgcaaggttccaatggtcttagccttattcttctttttaattttgtttacttgtactctcttttaagtttcactctggtcttatagaaccagctgacaactaggttagttgagcacaaagttctctatttccaaagccccgtcagatatttgaggctactgacaccgccactttatctgattttactaagcctataccccagggctggaagaataccccatgcatacttacaatgctcaacagctatttgttaaagagcctttctgtctcagtctgtggaaccaatgcactgggtgactcctgtactagagcttattctggagctctattctctcctcatccatgtgtaggtcacttgatttgatgtctagcttaataatgcactgttgcatgcaggcagcagtgatcatgatcatgtcacattcattacttacctgaaaatgtgactgaccagaaatacccatttcctgattcacattagtttaactttgttcagttaaatacaatcttgtaaggtatgcagagttacatttaacttcataatttaactttgtgcagaatctgacatctaagatgctatttaaagtctttgtgtgtgaaacagaattctggatatgtactagtaggtctttgttttaaggaaatatataaagattggaaaattttgtgatcatctgtccttatatttggcttatttttaacagctttatttttttttaaactaagatgcatacaaggagacaaagagaagacggaaactatgaaatattaattgatgctccctttaggaaatgattttgggaaaatttaaatgtgaaatttaatctttttataagagtgttatccacaatgaagtgttgaagaaaaggagtgagtgtgtgggtacagatttgtcttattccaatgttcttcaagacttagcatcagagctaaagagcaactttatctcccaggaaacagacatcaacatgaagagagaaaagcggcagtctatggatcacgggttatagctacaggcaaggttatcgctacgattcatcacccaaccatttggattttacaggtttcactacatcaactgaactgctctgctcactcagccctctccccttctgcacaatgaggacagtttccttcctgggtggcttttgccttgcctgtctagatggtaagttaggttactccatttctaaagaactaggacttaaacaatatatatcaaaaagatcatatttcagattgccatatcagagcactaacaaaagcctgggtcaaactctacataccctgctcatgaaaacttttgattagtgattttacaaatattcctttgagacacaatgtaaactaatttgtcttaaccctggagctgcaacactggagtttgggaaaagggcaatgggttattttaaagtaatactatgactcacccatgagattaagactgagcatgttatcgctgcacttaataatatagtatttatgccttattatactgcaagactcttctgttttccatttaaaaatatttatttttaaacataaatatcatatgtatgtgtgggcatgtgcatattagtgaaggtgtctatggagcctagtgtgagccacctgatgatccaggtgcattctggagccacctgatccaggtggattctggagccacctattccaggtaggttctgggagccacctgatccaggtgggttctggaaggcggttcctgttttgaaccactgatcctccgcagcccatctccaaatctctaaaatgtgtttttattagacgagtcttccttagacacaagtttagctccttgtgtgttatgaagtgacctcacactcattcctccctggtagcccagagcagcagttagggccctgcagccaggccataattagagttagccctagctcctatttagtcactcaataggacagattagagatttttcaagggctgaaataaatattattaaaaattcttgattcataagtatagttatcacacataatttcattttaagttcagtaaaatggttaacttgggagaactaaaataaatggaaacttgttatttaagtttgaaaagactttaaaaattggttttacaaagtgacatatgtgactgagaacttgagtttgggatgggagtggtaagcacagggcactgggatggtcatatgtaccgtcatgagtgcctcttacctgatacaaagtgccatcctgagagcagacttgcgaggctgagcagttcagacagcgaaactgcggaggagatgaactcatcagataagaggcatccacaacgggacacatttaaaacgtgctatttaaagtagtttactgtcaaacataagtaccaacatgagaaatttaaataaacactgagggatggtgtggggttttgggagaggaaatatttaataacttggtgattggtaaattttagtgttaagtaattttagcatttatctatgaagggtttttgtttgtttgtttttaatactctaaacctaccaagatggcatcctatccttttcatttcattttcaaatgttagtttctggggaatccttatctcctagcacagagagtaccaccatctttctcctctgagtacacagtgggtaccatctttttcccacctgctcctgagattaatctctcctacgcctcctctgcagctactctcatatctctgaggggacacagaattccattcaacctccgagggaccgattcattgaccttttcctttcatgccactcaggttagattcttaacccccatgcctgttttaacagcattgatgagctcctcgagtccgatactcatgtgtgcagtcttaatagttatgtaacttatacttttaagttacgcacatatttaacactgtatactcttccaaatggaaagaaataaaatgtataaatatctgaaaaattaaacagaaaaatatatgtttaaattaatcaggaaaaatttaacttcccaatgtagacttctaaaggctatactttagaagattttaaatgtcaccaagatctctctggacgttcgtcctttattatgcacagtgatcaccatcacgctctacacatagcctgaacttctgtcctttgatgacttggatgggtctgcaagctctaacctaccacattttgtctgactgtgcaaattgcaaaaatcatttagtaagaatactaagatacaaagaagtgatttcattattttttccctattaatctctttagtatcagttatgttttttcccctaaacctgccagagattgtaagtcaagcaatcagagacgggcatggctgctggactgactgaggctgcagaagaggtggaaactgcaagaagcatcttggaaaaagcagctagactgagggaatgcaacctacccacaagacagtgagcaagaacatgggtctgatgggggatgtccttttttttgtatgctgtgaatatagtttctcttattggttgatgaatataaaagctgttttggtcaatgtacagtcagcatgtagccagggaggaagtacaggcagggctaccagactaggagaattctgggaaaaggaacacagagtgagttgctagagagacgccatgtagaacacctgggaattctctggtaagtcacggccacatggagatacagattatagaaatgggttaacaattaagagagagctagccaataagtcataggtcaaacagtttatagttagtataaacctctgtgtttttatttgggactaaatggctgcgggaccaggtggggcagaaactctgtcaacacagtctgtgatggaagctgggggtgaacagacagatgctgacagtagctctcacggagtggatgaggatcataatgccgtttgacagagacactggtagttttctacatttgttagattagccattctgctaaatactttagtgcataattcttgctaagttttcctcatgcaagtactgtcacaggatcccaaaaactgaagaaaaattgggataaaaagctattagcatatatagcaaaaagttgtgttcaaaacatacaagcagttcctagaagtcaacaagatgacaaactacaagggcaatgaacttgaatacccacaaaggtgttacattactaacatgagtgtcaataagtcagaaaatgggccctcttgtatattatgggtatgactataacttgtgaaaattagtccattgtaaacctagcaatataggcaatggatatacttgttcatttgcaaaaatacatgccttggactatatacagcactttttgcaatgttaaaatgaaaataaaaccccaatgaccaccaaaatagttaattaaattatgctagtcacacaaactgaattgcaccaatatattaaaaagtaacttgaaaatgtaatcactttccttaagacatttcaaatgagaataaagttgatagcaatatatgtgattccatttatgtctcagaaaactgataaccactggcattgtgaagagaaatactagatcgatggtaacatcaggttgctgcataacccccaactgagacattaatctctaattccacaccctcaatttgtagaagccacagatgaaaagaaacctggtcacagatcatgactcccaaatgttgctctaaagatcagagatgttcatacactgagtagagctttctagaaatgagtctcaggcctaccccaagcctagggagtagaactttactttgtcatcatccctagataatttgtatttgcactaagtctatttatcctactagtcaacaacacatcaaaacatcattcggcataacaatcgtcaagcaaaaatcctgttatgaattataaaatttatagcagttgtttgaccacatctttgtttaaatttatagggaaaagatatttaaaaataatccatcatgatggaggcaaggtctagaagggtcatcttttctacaagagactaagcttgaaggggacttaagctgggaaaaggggagtcctgccacagaagctggtgctccgttactgcacaactggaagggaaactcagtccctgacacttttcctggaggcacagaaacaggagggagagtggttgcaaatatggagtacctttgcctgaggctaatgactcagatagagactcagtactccagtgtgacaggaatggaagctacacactgagtcactgactgggtgtagaatcacaagcagacataccacaacaatgacaagaacgaaaaactgaaaagatgccaaatacagctaaagcaatccagaaacacagcccagtgccaatcacaaaaccattcaaaagctcatctgagagaataggtaaaacaatgcaacatgattttaaggattgaatttttgtctcaacaggtacaaatatatatcataaagcaatattgaaagcataactattggccttatataagacatgttagggctttaaagaagataggcaactgaaaggtttagacaggagttttataaaagctgccttagacacagtgctggttcagaataatacttttctttttttttttttttaaaaagaatgtccagagcatacacagatgtgtgtgtacgcatgtgcagataaaagcaacatcttcaaacaaggatgggcagtttggattgttcagtaaactatatttttggcttaaaaatcttcagaataaactagattcttaaccctgttgtgtgtaaatgaatcaatcttaagtggactagaatgctaatacaacgaagtcctagaagcaagtaagaaatgtaacagagccgggcattggtggcatatgcctttaatcccagcactcgggaggcagaggcaggtggatctctgtgagttcgaggacagcctggtctacaagagctagttccaggacagctccaaccaaagccacagagaaaaccagagaaaacctgtctcagagagagagagagagagagagagagagagagagagagagagagagagagagagagagagaggtaacagtaactatcagagcaggaacaagctgatcttgcccagggccatgctagttagcaatgtcagtagtagtactcaactggcagacatcctactctcctgctgtaaggatgggatgaccaatctcagaactacagacaaggaatactggcaacaaccagggtcagaaaagaacaagccatctctccaggaccaatttaaaaaacttgaataaaaatgtatctaactaaaaacctgaaacctcagaaatgtgtgatgagaaatgtaattacactgagactgatttagttggcaatgttagtaaaaagcttatacgagttaaccctttcatgctctgacattaaaataactaacaatgctgactgagcttgacggcccaggcttctaatgaggtggaggcaggagaatattagtctgaggccagcctgtgctacggtgagctccaggccagcttggactaaatagtaaaaatcttccttcctccaccccagacacatacaaacggacaccacaggcaactttcaggacagcacttgtgacagacaggtgaactctaggagaggtgacctttgacctgtaggctggtctgtttacaatgatgagttccagcactcacatgctgaaatgcccactgaactagcaaagaaagacaaaattacatttactgtagtactattactgtagaattagagtatctgcttctaacagtgcagacttacactctgcagtgaacacctcgaatctgaaacacttcaggcttaaagattacatgaaagcaatgcgcttgtaacccttaaagcccacacacaaggcatattttatttatgcaatacaagtattttttaaaaaaaatgaaccctaaagtagtctgatgagttcttcaaggacacacaactagcaagtgactgatactagaatgtaagttttccttccgggtcttgagatattttttgccagtaactagagtaccgagtctccaagagattgttatccatgtgaaagccagatagaaaaacagcaaaaatcctggtttaagaacttaggtgtttcggtattatcgtatcacccattttcttctgaaaaagtaaacaaatatcttaaccaccatatagcacaaggattttttgaggggctctaacatctcaacagatgtcgcttaaatgtgatgtcagcatacctgtgaaacacggcaaccaccattatttgtagatactacatttcctgctgtagttcgtaattaacattttcataaggaaatgtagttaggcctggtagagacactataatgcatgatatactgtcctatagactgtatcagactcttgatgtcttatgggtattaactgctgcagctttctaatctatcttaggcacatcaggagagtctggtagcactgcaatcatgctctgaattcccccagaagggcttggaacatagtacagagtgggtgcctcacacttccccaacattcctggcttaggtacactcacagttaacctcagcaaaaatacttaaaacacagaaaaaaaaatttttgggggggtggggggggattgatcttaggttttctcctgtgaacaatttctccctcatcactggggcccagggcacaataatctactcctggcatcagaaccctgcactaattcacttatccataagcctgactttatacttctagtgactatctaatcctatctgttctctctatcacagccaacaattcccctttctgactgttagtgctctcagggcagaactgagtctatctgaccccacttcacacactcacatttctaggagacatcaagatttaaaaagcatatgctgcctctgctctcaggctagcaaaatcctggatgcatttattactggacttaaaaactcaccttcaaaagatttaacacagacattgatcttgtgcttgggccaatatttaggtgctggagaatgaagaggaactagtttcttctctttcccaaactaatttcttaaagttcctaaataatactgttggatttaaattacataactacatatacacataggtaaatagaaaagcaatttacattttctcctcttagtcgccatcttgtcatatagatgaattccatagtatgatccttccccataatttcaccattgcacagcacatccaactttaaaaagaataattaaaatatatcagtccaaagaaaatgtgaatttatacatttttatacattttcaaattgtaaaagatctgactagttataccaacatagaagtactagtttcaaaagaacactcaactttcattctcacagaacgtcaatagttcagatgtaacatgatttatcatttatcatatgatgtaaaaccgtatctcaagttgatacacagtttatgaatgcaacaccaacctcctccggttgtattctttaaccctgggaccactcttactcaatgagaaaagtgcagcgtttaataagagagcggaagatcgcacaagtgtagcaagctcattctaaatcctctggagttgccaggaggggaagcagttttttttttttttttttttttttttttggtttttcgagacagggtttctctgtatagctttggagcctatcctggcactcgctctggagaccaggctggcctcgaactcacagagatccatctgcctctgtctcctgagtgctgggtttaaaggtgtgtgctaccaatgcccggcggggaagcagttttatacctttccttagtctggggttagagacagggcattacaacgctggcacaatcttcgttcagggctttcgcctctggtgtacttgtgggtcctctgctcaccttgtatgaaatgtcaaagcgaactgtacttacaagctcccccacaccttgtctgaggctataggaaaactcccctaaaagcttcgaaatggcacaagaactttgtgtgtggttcattaattcatcaaagaatatataatgaatgtttatcaaagatccctataaatgtctgtcctctagtttccagtaaaagaaacaggctataagattttatttcaggtgtggagggggaaaatgagttttaaataaatgtctatctatctatctatacaaagactgaaattttgagcttgaagcctaacacaaaatatattcccaatgatacatgaactaagtaattgatattttaatgatttatggtgatatataaactttggaatttttcacttatgaactcttacaagaacaaagtagaaactctttatcttgcctgtaaaacaaatccctaagcaaagatataaaggtgcaattactaatcagtactaatcagacaggctgcacctagtcattagcaacttgaagtaccctgtcccaattagcaatgctgccatggaaaatttagacatttcattaaatcaaagccctatatgcagggcagcaaaataataggagaccaatcgatatcttaaaaaaagccaaggacaagttctttgattaggatagataaggaattgttaaaaaagaaagatcatggtccatggcagaagacagagaacagttttcttaactctagtaactttctgatgataattaactcagcaaaccagactttaaaaaaataaaactatatacaatattttgcatgaagaaaacaaaacaaacaatacagtaaaaaattcattgtatattttttcactatagatgctatctataaagttgttatcttttatgtttaccaatgatttattcttattttatgtgcattggtgttttacctgcatgtatgtctattgagtgtgtcaaatcacttggagctggattacagacagttgtgagctgccaagtgggtgctgggaattgaacctgggtcctctggaagagcagccagtgctcttaactgttgggtaatctctccagccccatatagggattttttttttaaaccacacaatcaaactaataaaaaaattaacccagagctacgagaatgagaagggaagaagaggaaggatgcagaggtcatgagggagcagaaaggttgagtcaggtgtagattagaagaaaggacatgtgataggtagggttttagttgggggggtggtaggggaggaagggagggagaagggaactgggattgtcatgtaaatcaatcttgttttcaacatttttcaaaaatttattttgtaacttgaatgccaataaatataattttcctactgtcaaaaaaacaaaaacaaaaacaaaaaacagactagtcatcagtcacgtgaaacattgccatcagcttccatgtcagaagcttcctcagataagactccttcctttcaaggactgtgcttaaatcccttgacacttcagttctcctttcagaaaagactatcagtctcaggaaatgccacacatctcaacagtgtgcctgtcctttggctgctgttccgctcacaactggacgatagggaacctgcccatacttcacatccatctcctgtttgctatgtgaggtttgtgctttgttctccctctagactcaggggatatcacagaaaaggagacaggatggagagatggggcatgacttagcctctgcactagctatggacttcctgcagctgtagtgatctacataagacctgcacagctgggcagagcatcacttcatcagagatgggagaggagtccatgaggcccatcctacgctggggaaaaactggcaattaatggctgcctggggaaggggtcattttctttggtggtgtgtccagtgtaagttgtccttgttccagtaataaccacttactcaggctcaggcaagaaactcttactaacctcaatggaccacaaacaaagagaaggcacaaaagtaggagtagaatgtactgaaaaggtttccaaccagaggaggggctgaggagagaggggagtaggtaaggaagcaagtcagagtcactatataaatgcataaagctgttaaacagtaagacaaaaaaatttaaaaagtgacacatcttaaagcatgttgacattataaaaaagaaaacatttagccagggagtatctggagtatcttatgtaagttttacaaataccttctttagtcacaaatgcattgatgtgatgttcttgggatatattgttataaaatattacataaatattatagtctaaaaattaatttttatatggtatatataatgaaaataaccagttcctacaaaaaatttggatatattctgattttacttcttttcctacagatcagaatcatcaaaacagtcacaattaggtattattttacttacctcataagaacttggaagttttagttttaaacttagaaactttttaatagttcctacagtaactcgtgtagaacatcgaatgaatttcttcatgagaccctaaaggaaacaaatgacaaattaaacactctaatttgtttttactaaaaccttaggcattctcgggcatatacttaggcatacatacacttgtaattccagcattcagaggattttaaggtgggatttgagtttgacttccacctgggctgcaaggggagagtgtctcataagaccaccccacaccaaactgtaccataccaaaaccaaaggcatggttttcactatatgctttagtatttttaaaacgtaaaacaaaaaaccaaaaatttttaattcttttaagtaaaatgttcctaaacattgcttatttacatggcattctttaacaatgtatcagtgtgtgaattagcaaaatcttgtcaagtagacaatctgtttttctctaagatttttttaaataaagaaaatagtttaataaagaggctacaaaatgtcaacattttattaaacgatgttacttagtgacacttgttcagcacagtgcagaatctggaaataactgcagagagcagacttgggaggagcttcaagagttaagtccactgcatgcctcagcacctgccagctgtgcagcgtgggctctgggtggaggaagagcattccccagggaggggttactgcaggttactatacatcactaaggtctgtatgccttcatgcgtttcttgttttacatggagacagcggttctgactcactctttaagcttgagcagagccccaccctcccactgctcctagtcattaataattcagagatgtcagaacagttaaaggaacatttttaagacaaggcaaaagaatgtttctataattcataattcaataaagcccgacacagatctaataaaattctaatctggagtctgtgaaagttgacttggaaatacttagaaaataagtaataagcaccttctctagaaatactttataatgaaaccaaactaaacgtgctttgttccctggttttctacacctgagaactactgtatctatgtctagaaagtgctgacaccgtaagaggcaatgactgacaggtgctgggcagaagtcaggatggtgcacaggagctaggagtggggtttcttctcaccatctccttcctgacatatggagaaggggagcactgtgctacaccccagggctcacaggaaactgcagggggtgggggaggaggtccatgtctaaccctaccctgctcagctgtctagaaaggatcagtatctttggaacatctgcatatttgaagtaataccacatggaagaacactgttttgtttcaagaatatcatcttccctccctatggcaccaacacccttactctgtcctgctgtccatctcgagtcatgaagtgcagaattcagaaatgtcccttccgtctaagctgttttccctgagaccacagtgtgagtgtagcgtctgaagtgccccaactcagctccttcagaagcagaagtggctcagcagctgtcagaggctgataaaatacagatcctgtctttctttgctttggaagagttaaaagactaaacacaaaatctgcagcagtccctcctgtgggctccgaggggtctgcagttctacgacacagcttgacaatccttcagttttgtggagctttacaaaaacaaaagttagctttttgtttaagcccaaattctttatcatgttttcttcttatttttttttagtattatgatttacatctctaccaagcagagtaattaacaagtgtgactttaacttcttaaattgaaatgtaacaccataaagacattatttaaaatgaacaatttagtagtttttatagttgttcaaccattacaatatctaattcaaatttttccttgtcctccaaagaaatcctttacatatgctcagctaggagttacttcctagtcctgctcccaccccacctgacacctaactcaactgtctcaagtgacaggcctttctttttaaaccacttatatcattatcacatcagtgactaaataatcatttgcttactatgctttgatatatcctttcctgaaagatgctgatagttaaaaatgattttttaaaatttcccaatacaaagtactgttattagtaatacaacagtaaataaattcaactgaaagatctactgatttacagagatgaagcaaaagaaaattataagcagaaaacatgaacttgtacataaaacaaaatgcagaaaaaaacccttagtgactggtatgtgcttggacaaagtgacaaaaatctatgtaagaactaaagtagtgaacatttataatgagaatgaaagctgctcccaattaaaaaaaaaaaaaaaacaggaaaaactaaataatgaagacagcggtgagttttagtatcccttaggaggcggttgaatggtcagacacagggaaacatgatgagaaatgaggaccatgtagtagataataactaaattcttcaagaagtttattagttcataggggccttataacacaactttacttcaaaacctataattgtattaataaaatatattagccatgcattggaggcttacagaatcttaaataaaagtagaagattgaggaatataatttagggctcagcagtaagagcaccagcactcttccagaggacccaggctcaattcccagcacccacatggcagctcacaaccacctgtactccagaggacaccctttgatagcttttgctggcaccaggcatgcacaagatgcaaggcatacacagaggtaaaacatctacagatataaaatacaactaaatttaaaaaagaacatataaagataattaataaaaaggtcggagacactgcttgaatgaaataaccactcttgagttggctgttgcaatttaaaaattagccactagatggtggcattggcccgggatggttgggggtgggatgctaggtgcctggaaagcaatgtctgggtcatattcccagtgtgggactgcagagaatggcattcaagtgcattacattaacaaaaaaccttgaaagaaatcattttgaggagttggaaaaatccatcaaaaattaacagagaaatctgtccactcacctttactacattgtcccctgactgcccattatttcgtaaacaatctagacagatagcaatttgtgggtcacttctatggtagtccttatcatcttggttttcatcaccttcttcatctgctttacatttgtcaacctttgaaatgtcatctgtataattgaagcaaagcccacgtaacccaacgttgaaagtcaatcaacaatccggtactcatgaaagcaataaacaccctaaaatatttcctaactggtctgaagaaatgctaattgaaaatgtgagtactttttaagatcttctaacatactcagcaatggaatattccccaaaggccatcagaaactttacagtgtaagatttccaggcatactggaaaaatccaaatcaaagattttggattcactgtatttttggtcataaaagactgaaattagtgattaggctactttagaaggcaaataggataacaaatacttccaaattcagtaacagatgtcctcaaaataaaaaccaagtgataactttcaaattatattctaaattcttcaaattacaaattatttataaaatcagctatagaaaaaatgagatttttaaaatcatgctttgtagccacttaacatgttaaaattccactaagaaaatatgaatactatacataacataaagtatgcttaaaatgttacatgcatacaactgcatttattgatgcattatggaatgccttgaacagtgtttcagacacacattgtgctaggcctgaggtaccaataacacaattaaagggcatgatgtctgaactgtctcatgtgcttgagtggtggtgctgtctgaaaggctatgaaccctttaggagggagccttgctggagaagagtgggtcctgaggtctaaccactcagccgcacttcctagtctcttctttatgaaaatgggtttaatgtgactgggagcctcctgctcttgctcccacgccttgcttgccatgatgtacttaactctcagtcacagactaaccaaccttttcttctctccccatcccctcctggttgcttcttgtcaagtattttgtcaaggaaatgaggaagtaacaaataccaggagttaccatcttcagcattatggtgccagggtacaggaaaaggcaaaaaacaaaacaaaacaaaaggtgtgggggggtgccaaatataagatggggaagtatgaaatatgaaatatgtgaccatgtaagattcaggaaaccttttcagatgaattatatctacccaagctaaatatgaaaaatcagctagccctaccaatgagagaatagtctttgttcaatatagtaaaagccttacactgtacttacgaaagtgggaagatggctctttctttttcccatccttatttacacagaacccatgtacagacgctgtgtttcatgaaccaaacacccagctcaatgaaaagccccccccattaaagaccaaatccaaaagtattttgaaaaggagaaaataggaaaagggagatgaaaatcataaaccaggatataaaataggtctattttgtgtatgaccctcaaacacaaaaaaatcctagcttaaacctattctgtaattctgacagcaattccatgtgcttttgtgttagtagaaactggaatatttaattaattttgtatgatctacttttttaacattaagctgtctaagtacattgcacacaggtaaaataagcttttggttaagccatttcagcatcttcattttgttgttaggtataaaaacagcctcttgctgccttattctactcatcaaaactattatcaaagctcccctgctgagggattagttctacagttaactattaaagccattatccccattataaatgagaaaaagagaacatgcatttcctcgtccatctgaaatggcactgaatttatgaaagttgatgagaattcaatggctttatgaggaaatcaaggccaggactacattcacaaatgcacagaggctactgtgatggtatttaggacattctgaatgaagtcttgtgttgaaaaacacgaagaatcatattgctctgtaatttagatatccctttgtatggataccatatacatacaaacagctcattctcagtacaataacatctgtgttgtggaatattatttgaagatgtgctacatttggaacatttgtttaatgatgcaaagatgtgttgtattcttttttgttgcatttgtttaactctgcaaagctgtgctactttgcctgtctaaaacatctgattggtcaatagtgaggcaggagaaaggataggtggggctggcaggcagagagcagaacagaaggagaaaaagagcaaagaggaagaaggaacaagagaaggggaggacatcaggggtcatccacccagctacacagcaagcccagcttagtaagtactgaaaggtagacagaaatagagaaagataaaagcccagaggcaacaggtagacggggaataatttaagaaaagctggctagaaacaagccaagctaagggcaggtaataattaagtctccatgtgtgattatttgggagctaggtggtgggtccccaaagagtaaagagttaaaaagctacaatttgccactttgttgaaattattgctgttactgtgtataaatgtgtgtgtgagtgtgtgtgttcacagaggacaagactcaatcttggatgctcttcctcaagtgctatctaccttggttttttgagatggggttgctcactggccttgaactcactgactaggatggactggctggcctaagagactggcctaactctgccttccctgtgatgacttttaaacactgtgtgtacaggtgcatgtgtgaatgtcagaggatagagctccaagtcagttctctgttgtcaccttgagggaccaagggactgaattgagttatcatgtctgtgtgtaggtttctccaggccctgctgaaacggttagttatcacctgggtcccagagaagaacctggacacttggtctggtgatgggaacaccctgatgaacacacaaaacacctgctgacagatgcaagccctaagcctgaccatgagagtcccacctgcattcctttcagagccgcagagcacagcaaatcccaacttggctcttagccacattcatttccgtctcccattaaagtgcttttataagtgaagtaaaattaaaataccctcacgtttgaggtgcacactaagattatttcttgtaacagatttttctgtcctgaaactaggtattaccacctactcagtttcctctttcacttcttttctttttcctcccaaagtccaatttcactcttcaactaccttcacctgaagtcatgcagaccctcactgattcagatactatctcatgaagggctgcatgagtcttgcacaggagaactgtgagtgtagaaagacagtactccaccaacttaacaacgagaggcaccagaaacacaaataagagttaccttgtccattttcttgaggtttatttttcttccaaaattccaattcacgctgaagttcttctaatttgaaggaaaaaaaatgaaaagcataggaagatgaaatctttaatagaaatagtgatctcacaaaacacgaaaagtctgtagaacccaaagggcaacttacgttctcgtagtccaggtaccagcttaaatataatctcctccagtgtattatccaaccttcaggggttgggaggataaacaatgaagatatcaaaatccaatatgcaaacagttgagatttcttacaagtaagtagtagtcccaaagcccccagccttctctacatgtacaccctctgaacatgcctttgcttgatcaagaggtagagcccagatgtctgaaattcacaatcccaagaatagggactacactggaaaattgcttagaccaaaaagaatgtgggacaagtaacgctgagcttggaccttgcctaggtcttaagaggccctgcatttcttctccatgttcagcaagtaggggagtgctccactgccctgcggaggcagccctagaccaccatggtggcagatcccaatacatggcagaacacagtagttaactgaataagcagcaatgagtaaagccaagattgctcactaacccattccaatggtaaaaaagaaaggaatgcttgccatctgaaacattaatttagaggtggtttgtcatacagcaatagctaacgttcccactcttcaaatccctacagcacaggttcttttctaaaaatgactgtgctccatttcatcttctgaaaaatgtggacagtttgactattctagctccctagacacaaacttatttatctcggcatttttctagttttcttttcctgatgatacataactggctccatttcttcagcctattctgctgcttctacaatacctactccattttattctgcttaacagcgttactcttctcagacatcaaacatctaaagaagcaaaatcttttccttaacttaagcgtctgtgaaagctatttctggagcagcagagatggcccagcagtgtagagaacttgatgctcttgcagtggactggaggccagttcccagcacccacaatggacggctcacagctgccccaactctagctccagatctaatgccttcttctggactctgcacatatctgctgtagacacaccacagacagacagacaggcagacagacacacacacctttttaaatctttcaacctgaaaaactttgaagcgtatagcctgttatttctgttacatactcttacttgctgcttttatcttcctgaactccctgtcattgatccctatgaccagtatagtgtcacagcaatctgggttcacacaaactccatgaaattccctttccctgttttaatttgttcccctgtctgttctatgtgcctaaatatttttctttatccaactaaagttatcccccaatgttaaggagcaggttccaggactcttcagacaccaaatctggatggtcaagtcctttatataaaacactttaggatgtcatatctaatacacatctttctatagcttcaaaccagctggagtctgcatatagtaatacaatgtgaatgcactagctaattttttctttggggataatgacaattgaatgcgcagtacagaagcaatttttcttgcaaatatatctgatgggagcttggccaaatccactggagacagaacccagagacaccgagggctgaatattctgtgttgctctctgtatgtcatcttccttctttcagttttttccatgggccatgtttccagggtcctcatctatttttgtagcttgaaactaacatgtgggcagttgtttgtctcaaaccttgggtctagtctgtatttccaacagatgctgaacaattaattcagccacctcctttcacccacgtatgtcaggactgtctcatgaaacctctccagagcaacacagacttcccttggttacctcactattaaagtctgacatgatactacaacactcccaaacaggctcaaagtgaaaaggactgactctattttcttccacttgattgacacacttttctctgagccttactctcagctacttctcggtctgtctcccacaaattctttcttaaccaccttgcatcatccttccattcttagggaccatcacctgtcagtttcttttctcccagaatgcatttctttcctactattgccttccgattattttattaccaatacatttatccaatctagttcacctgcatctgaaaatgactcaatagaagtcaagctgaaaagcccaagagaatgttatcattttaactgaagatatatttcctaactattacataatcttatttcaaattttcattaaaagatgtaaaaatgaagtaaaatgcattaaaaaaactgtaaaagcctgacttatgttcaagtagtgtaataattgataaagattataaatgtatacagttaaaatcagacaaattatgaaatatatatctttacctcaacatttctaatggatttgtttcatgaacttggttgccacaccttggacaatcattgctgtcttcaaagtgctggacaatacaggtcttacagactaagaagagataagacagtaggttaaaattaaactctacaaactgtggggatgttttatgatataataaataaagcttgccagaagatcagactgcaaagctagccacactagctagccaaagaggccaggcagtggtggtacacacctttaatccgagcacttaggagacagagacagacaggtatctgtgagttcaaggccaccatgagctacataaaactgatcagtctaaaagataaacaaagctcacacaatgatctcagcacttgggatctcatacctttaatcccagcactagggtggaatataaggcaagaggaaatagtagctcaaggggtctgaggagtagtatagtctggagatgcaatctgaggttcactggatcacccctttggtctaaaaatcattggtagaggtgagaaactttagtggctggctgctttacttctctgatctttagttttcaccccaatatctgtttttggatttttattattcatgctacaacaaacttctaaaattataccatccaaataaagtataactaaaaccaaatcccactgtcacaatatcaaaagaaaattccaatttacttattgtttctattaatataaactaaagacactctactcatagcccattaaaaactggtccattttaaataaaagtgtctcatttaaagtatgacagagaaaggtaaaaattgctgattttgcttttatttcttttactaaaagtttatctgattgcaatataaacagttctcaataaaacttgaaaggctggacatgtagctcagtggtaaagcataccatgtctgtgagaccctgggtttaatccacagtaatgggaaatcaaaactctggagagttttcaacatgtttggattacttataccgccagggtggttcctgggacaaagcagcggttatgacataatttctgggccttacagaacatgatgaatttgtgcacataggtgccacagtgtcacaaagcatactgcataggatatgggtgtcatggtggcacaaaggcacaaaaggtgaaactggaagaatggctgagaaatggacaagggaattagaagattctaaatgaagaatacaagtttggagccatatggcaacacagctcacatttcctctgaacagtactgatctctgtgtcatgacttcttcctatcttttacctatgcttatgttatccagtaagcaactgcaaattttagcaactgaactttaaaactgcaatccaattcctaccccaataattccctttctgatataatttctctatatcatctcaaattttctctgggtatagacctgctacccttccttcattttacaactgctcccatgctactccttttcctctccttatatcccacatgctttgacagaagtgaagtttatctaaatgactggtcaggagcaaacattaagagtcctaccactgagatcaggtctgcaaactcaggcatatcacacacattgcctagagcaacaatagggagaattctgccagtcatttaattttaaagttacttcgtatatattggaaataaaatcacttatttaatttcatttttcatttatttaaagaactgaatgccaggtattatactagaagctggcaatgcaggaatgaacgacataaactccccttctttaaagaatgtatgttatgcttagaacggcatgtaaaatttaatggtaagtggtagtcttatcttccctgcccataagaaggtagaagcagaaccctggtgtctggcagttgttcagatgcaatgatcagggtgggtctcctaagaaggtgccatctcaacacatctgtgtgtgtgtgtgtgtgttgcttaataaggacacttaagtcccattctatctttctctttattctaacggtcaaggatagtaatctcttcactataattctcctgaaatctagatgaaagacatcagaaaacatgcttaaaaactaagatgataaaagcagtgcaatgtataatatagaagtaagtgtctgtcttgttcttcaagatatcctgatacctaaagagtgcatacaattttttgtttatttggtacagggcctcgtgtagcccaggctacaaatttattaatcttgatcctcctgtttctagccctccagtactgggattacacataagcactgctgcacctagatttcaaaagtgttctcaaatgttcgttcaaaagtcaaaataatctctcacagggtcaccttgttaaaacagaattcctttagaaaattcctggtatgtatgtgctcattccccagagccactagataactaaaatttaaggggaaaaaaagagacagataaaaacaggaataaatgatttttgacaaagcctaatacggctaatactgacctggagctctgattctggtggttcaaaagttttatcacacttaatgaattcagcaatccatcgttgtctaccaaccttgaccaaacacaggtacatgccatgcccagagcaaatcctcattagactagtcaagacactaagtataagaccctatcctcccagggacaccaatgttaatctaaattatctgatcaaagagacataaggctgaagcatccaaaggtacacagagttctaaaaataaggtgtgtgagctgcttgtggccaaagcagcaccagtaccagaacactgatgaggaatacttatctaaatactagatctggattattcaatatggtagtcattggtcacatgctgttacaagcacctgaaatgtggttaatttgagatgtactgcaattataaatacatttagatttaaaatatttaatatacaaataatcttagtaatttttgttattacaaatgggaataacaataaccttggatatattgggttaaatattaaaattgtttctttaaatgtggctatgagatactctaatttatactattttgtgcagatggatgttttgtctgcatgtatgtctgtgtacatgtgtgcagtgctcttggaggccagagaaggccttagatcccctggaactggagttatatatagatgattgtgagccaacatgtaggtgctgtcaacaaaacctagatcccctggaagagcagtcagtgatcttaagcactaagccggctcttcagccctgtattaatactagataattttaattatatgtgtgagctacttttggggggggtggttaaggactaaatccagggacttgctcatggcaggcaggtgttccaatgtccccaaccttgtttaaaatttgagtttgagaccgagtctcagtagctcagagaggtcttgaagttactgtatggttgaggcacattatgaaactctcctcacctgcctcagccacggaggagctggggccacaggcaggaacctccaagccgattgtggatcacagctatttctactgaggactatggctctaaatgggtagaaactcccataagaagtgggtttattttccatagggacatttgagaatactgtattttattcatgtcgtcaagtgaaaaacaagaagctcctgtgggtctttttctatgaatggcagcactaacacctgaatgcaggcttcatgacatagactgacacatttctagaggttaaggctcaaaactaaccttaaaaataattaaaattttaaaataagtttaaaaagaaaaatttaagatgtagaacaacacactgtttttatcctagtgttcctcagtgttcaaattacttgctggtggctggatggctgtaatcatcaattatgaaaggaattacatactagccatcatcctaaatatgtatgtattttccaacttctatgtataaatgtgagtatccaaattgataatcaattcactggttctcaaccttcctaatgctgcaagcctttaatatgcagttcctcgtgttgtggtgacacccccccccccagcataaaactatttcattggtactttataattttggagagaaaggtttgccaaaggagttacaacccacaggttgagaatcactaaattagatacattaatacaatctaataatttgtttttcactgcagccctataaactgggtagcagtatctgacctcatacatgaagaaagtgaacagaggacaaactgtccaacatcatgacagtaaatggtgaaagtgaggatttgaactcagagtctatttcatagctaagatatatccgtacgatatatctcttgctgctaactctttcctactggtctataaaatatagaatgagactaccttatccattaatttgggggttgtatgtcagctgacttgtagaattagatctcctttagtatattacataaataaaatggtcttttcaaatagtttatttattcttttctttataaaaacaaaactctaggaaatattcctgccttcttttataaggtgctaaataattaccatgtttatattacacaaatgaaagcctgaggaaatccaggcccaaacttcagtgacaatggaaaactgaaatgtcgagatggtttctaacgcttaacaacttctcatcactgggaaactgtctgtgagcttcagtccaggaactgaaatccagactagcaacagagcacacctaaaggtaccttatagagatgttcaactgctcttctggctaacttaactggcgtttggatgatgttaaaaaggccccagtctctggtaggactatgcatggagagcaccaagccttcctcctcaccagccactttagagatgtggttaagctgcatgaaacggctggggcagaagcagttcggtttcccagacaccctaggaggaaaatcacctcaatgacaagacaccctaggaggaaaatcacctcaatgacaatgctaagcttgccgagtcctagcagatgccaggctctgggctcagagctttgtatggactacatttcagactctggccatgcttctcaacatacgagcaatatactaaagatcctgagaagactgcccacagtgtcctagccatgcagcagaactggcatccaaatttccccttttaacatctaaagcgcaatgcaatgtatctccggatagagagtacttagtccctgacctcaagaagacatcttattgcttctgcagagtgatggataaacccagggcctgtagcatgccaggccaggactctatactacccctcccctactttgtatctttaatttatctaattagttcatcataaacatcattaggtgaaaaaaattactaactgaattcttgacttctaccattctttgggtttgaacaaggtcaagtacacaaaaattcacagggagagagctatcatgccgtctgatactgtttttctaaattgaggtgggcagcacacactggaccacacactgatatctgaaggtccccttttgaactaattcaactttcctgagactctaactctgcaaagctctctcattggggaggccaaagataactgggaaacattggaaaatgatgcacagtgggcagaagctggtcaccaaaatccttctttacagaacctgttagatggccccattctaggatgtagctgtctgccacactataatctgaagcactttatcaacctccaggataagtcactgtcacaggacaagatagaatcaaatagtatgtgagttaggtacaagtagggaggccaaagtagcacagcatggtcattccggataatcctgccacagactgcccacacttgaatctcactcctgccattaggcaaatgtttgttctgccccgagcataaggaagattaaaaaggtatactgtactcagttgttatggggaccaaatgtaattactggtttataatgtctggtaacttgtaaactcttggtaaacgtgagctccttctgccaattagattatggggtaagcatacagacagaacaaggagaatcaacatcaagtattgaataccaccagaccataactgacttggtatacctattttaacagataggcatcccactgaaatgggaatgcccatcactttgtggttaatatcctgcaaccatttctactccaaggaccctttgtaactctgatatgaagtttaagacactgattgcttcacctggagaaaactatcttctcatgcaggacacttctttttctggggcaaggaggggtagggtaggttcttgtccaagatcaactaacacttcttcactagacatcttcccctgaatttcatgttcagacattccagtatgtagctcacagtcaattcccacttgttttgaagaaacctgctttgatgtgctattaaaaactgatttcatagctgaaatatccaagaaccatcttacttccttattttgatggttttgggggcatctgcacaacaggtacaaggtcatttgttggcctatcttagatatacagctcacccacatttcttatttatcacagagcccaagtctcccagctttgatagcacacggtaattcagatttctcttgctgagcactaattctgacattactgaccataaaatccattaattaaaattaatcaacttttctctcatatctttagcattgccatccattagtaacactttatttaataaattgaccaagggctgactcatgctaaaaacatatagttgtattggtcttatcttccaacttaaaacatttttccctccttctttgagtgtaccaccttaaaaagaacaaaaataaaccaaaaccaaagaaaccaaagagtctccctatgcagttctggctggctgggagctggtctctagctcagaggtctgcctgcctctgtctcttgagtgctgggataaaaggcatatacaaccatgtccagttgtgccattcttttttattttttgagtgctggaggtcaagccttctaccagtgaactagaatcttaaccctacaattcactatgggtaacatttttcatactgtttttgtattgaggactttatctgctgacaagttgtaaggctacgactatatgcagaagagttatgtttcctgctttttataacatattctacatgtgtaactaacactgtagacacacctgtagccagcccctagaagccatggctacagcatccctacaaaacggggcctaggtttataatatcccacttctgacaaccagataatgtgggaaattaccattaaggagtcaggaggtaaaaatacaagggaatttaatagggaaaagccttacttacagagagacctagccagccggcgcggcagcagtaagtacagcaagctgaagaagaaagcgaaagcagggccaccgcgtgagcgtccgtcactcttaacccttccccctacgtcaccctgaccattcccttgcaggcgtggtcaggcacacctgtagccagcccctagaaggcatggctacagcattcctacataacactgattttaaaattccccaacagcttcaatttacttccatgagcttcttggctttacaaatgtaaggaactagtaaatatctttatttctcctaggctgttacatatagcttgcctcaaaactctatagtgaaaacaactgcatggtgtataccagaatagcattttgctttttctccacacttcctagaatgctgtgtccctttcccaatgggacaaagaaacaggcagcaagggaaaggctttgaacagactcaggacagaaaccatgcttcctttatgcatgacgttggagggacacctgagtaggaaggggacgctcctaagcttgggaaggcggaaggagaggcgtgctgagcggcaagtcaggtagagttccatggacgcaacactgtcactactcttcctaccaatcaaaattgtgtccccacgcatgcacgcacgggcccacactttgactcctctgcctctctgctatggtttggatgagatctgctcctgtgtgctggaggattggcccctaattttatgatgcaggaggtgatgcaccttttaaaggaggggtgagcaaggtctctgagtctcctgaggcactgcttttcaaagggaaggtagctctagctattaggagcttctacaccagagttgataaaacaggagccagcttggtctctccttcctcactctgcttcctgatttgagatctgactctttgctcctgcaaatgcttaggccaccatgtggttccatctgcagcaatcaccagaggccacattaaagaggctcctgatttaaactctgactctctaaaacctcttttctttcaaagttgcctgccttaggtgtttcattatattaaaacacagactaaaaatgccctttcttctttggttacactagctcaattaaaccagaatcttgattatattcaaatcctacatattctggttttacattatagctgggcactgtggaagaaaaacatgaaaccatgctgatggatctctcatctttaacttatgaccatcaaacctcatgaagtggggttttcatctgccaggaagcgatactcaatgttcccaagtccactatgctcttgagcggacatctccccaaactccatcaaaaccttctcccttctcactagtcatcaaataccttgcttcccattttacttaaaacataaaagcagtaacagaatcaaaggggacttgtgcctgccaacatatacgtctccacatatacgaccactactgtgtcctaacctgtttccagaacattcatggacctacctctgtaatttcagtcctgtgcactggatatcttatccgtcacctggcatatataaatccttcttaacgattcttatgagtatgcaggcaagccatttccttagtgtaaaagacacttttgttgactctattccttgccaactatctgtccattgctttgttcccctttgtaataaaactggaaattgatacctatatactccccccctctcaaaacttacattttcattttgtctgtatctttattaaggttaagcacaaggcttggatttatttcagtggtagattttgggcctagcatttgtgaggcctcaggttcaatttccaggatcagtaaagaataaaagttaaatatatcactcacagtacaatggtcaactagggaattaaatgctttctgtcttcccaaatgtactcttatttttttctccttccatctactggaactgctcataacaggatacgtacagccaaacctgtcctactaacttaactacacacatgtaagtcagctaatttcccctgctcttaacactcagagtcttcctacctcttggcttctctttactgtctccagggttaaggcctcgtttggtattctgttctttaagccacagtcatttacttcatggtttcactgtttatgtatgttctatatgctgacagtcttcattaacaaacatggtctaccttcaaagtatattcggaatccgtcattttaccagcatgactaccctggtgcaagccatcaccatccctttcctgagatactgccgtaggatcttggaatttctactttcaatagaataatttaggtgattctttttaactacaatccagtttgtcttattcctttactcaaaaccattcatgaaatagatcttcatttccctcagaagaaacaaaacaaaagccacccaaatccttagatgtgcagaacctgtggcccacaccatccccacctcactctcaatttccattcactcgctgatgtctaactgtcctggcccccttgccacttttcaacatgccacactcacaccttccagtctttgatcttagtattcgctctgcctggaacttctctatgatatctgacaggctagcttctctacaataagttcaaatgtcatcgacttaatgaagtttttcctagatccagactttcacaaattatagcaccttcttgactatccaattccccctgactagtgtgatcttccctttatctatagcatatagtggtaactttctaatatacactgtgatttacctattgcaaactctactgccgactctgtcccaagcacctgaaccagaatctaaacaagaacaagttcaagaaatctgtagagacaaaaggaagccataggggttaggatagtaaagggagcccagaatccagggctacaactgtatcactgtattcaagtcagaaagaagcctgacgttgtcaactgaaggaattctgagtttccaacaactatcaaaaggtactccttccaattttaactaatatctacaaagagcattttctctatcaactggcattagcagattctaaggaaattttgtttactcacttaactttttttatacaataatctgttgaaaatcagtatgtataaaacaaagtaattgtgaagattcttgaaagtatccaaaagaaatcattttctacaatgttagactgtagctcttcagttcgcatccagccttcaagctgggttcttaattagtactgtttctttaccgttatctctggcactgaggcctttctgttacacacttggacctcagtccaacactggtatgggttctaattcattctggcccatacttactaccagacatcaatatacaagataatttcatgttttaaattttgttatcccttcatttatccatctgtgtctcctatgatgatgctttgaccagcggtttattcctcactagctcatagcttcaaaataaaaaagatccgggctggagagatggctcagtggttaagagcactgcctgctcttccaaaggtcctgagttcaattcccagcaaccacatggtgtctcatgaccatctgtaatgagatttggtgacttcttctggcctgcaggcatacacataataaataaatctttaaaaaaataaataaaaagatccataagtgtaacataattcatctttaacataattaacatctagtacctaacctgtttaaaatcagtaactattcctatttctaaaagtcatcaaaatgagcaatgtaattacttttattaatgagtaccaaaacgctgcctgaagctttaacaccagtatgatgatgtcttcatttctactgcaacctatctatcacaccgtgtgtgtgcctactggtaatgtaatgtcaatttggacattttatttttctaaataaaaacagactttcactcccaaactttctaaaaaccttattaagaaaacatcagaaatttcatcaaaaataatgtcttttttcattaggatagttattcaattcagaataggagattcatctccgtattgagtacctagtaatacctcacgaaatcagagttttctctcatatgtgattaatattacttaataaaatactaaaaataaagataagtagacaaaggaagaagaaacctagggaaaggtcttaatgcatttgcagctgtgcctgagtccaacagcagaactgaggacccagctctggtatttactggttgtttcttatttctcagtcctcccgaagcctttctgtagcctgtgtcttcctattctttggtctctgatggatagcaacaaccaagaaaggcttttctcggcttcatttcccccacagcatttgttatataaagaacctgaaattccattttttttttttggtctgttgtctgtctgtcctatcagagcatagattcttagaggtcatgggcttggtctgtcatgtttgtttctctgtttcctgtggcaagaataatgcctggcatatgtaagtgccaataaacacttgctgagtgaccaaataatactgcccagttataaggggttttggttagattaagtaagacaatgaaaagaaagcttgaactcccatgacaaacattcaataagcaatagctacgacttcaatcttttagtagcatttattttaattgtggtatgattaaaccataaactgtctaatttaagaattgctagaatgacaacgtctggtccagagcggtacctgacagactctcatataacacagaaccacctagagagcttgttaatacagatttctgcttatccccagaggctctgattccacaggtctagagtgaagcccaagaatttgcactgctaatgagttcccaggtgaccctgttgctcatggctgctgatagcttggagactgcactttaaaaagcaagagtatgggacgaaagatttaggaatgaaatattagccctgacacctaaactgagtaatcaaatggttatgatattcaaaaaaaataaataggagctggagagatggctcatcacttatgagtgtgtaccactcttacacagttacagaggacctgagtttggttcctgactcccatgctgggcagcccaatctgcatctccagctccatgggatctgacatcctcttatggcttctgtgggtacctacactcatgtgcaaaaccccatacagacacatacatgatacttaaaaaaatacatcttcaaaacaaaaccaatgaataattaattaaaaagtgccaccataattaagctacttctgcattctcttacatttactttatctctgtgtgtatgtgtgtgaggaatccaactcaggcttgatggcaggcacctgaaacctgatgagtcaactcctccattcttaattttgtgatacaaaatcaccaagtgcttcgtagtaacatcaagtgtatctttcagtgaacctgccttctttgtataagttaaaaattaatacaacagtgttttgttccaaggggttactgcaataatttctgaaagggcagaaagaagaaattatgtaacacaagggtttttgtttttataccacagaatttcatgtctatgaacacattttctccccctgaaggaagaactataaaattcccacaagaaccttgatctagaaaggggtaagaaccaatgcactgcagtgatgacatcggcacctcactgatgacatcggtacctcacggctcaaaaccgcgctgcatacattgatcacatctgagctttaggaatgaagctctttcattcttaagtaataagttttattttaagttaacaatatacaccatcactagtatatataccccaggcaactttcatacacttcttagggcctgttaaagacagaggacagcctctggaccatcacacactggttcctactctagagtctatcctttctctaatactcacagatccctgcctcagttggttctaggatagttttcctagctcctatccaacattgtgtccatgtccttcaagttaggtagcactgcatttgagtcgctgaaaggaaaaacacagtaatcaatcattaactgtgcatttcagcttgtattacatactcaccagttaggaaggagacacttaacctacatctggccctctccttctacatctgtgtaggagaggggcatgggtgagatggaacttagttacaggatggatacctgctggcagacaacagagcaaaggaagtcctgtgtgtgctgtagtggaggagaagcagggcaaacaaatcacaggtgaacagctttaattcatcctggagacggcagcataccactgagacaggtttttggtcaagatgaaaagtaacagcgacagacattatgtctttagaaacaggtacactggttaagaatatgctccagtgggtctggtgagaagggaggtggacttgaacgagaacagtagcagggggtgggactacatgaactgggattctgtgacagttttgttgttaagggtaaagagaccaaccgacagctgtctaactggaccaaaggtccactcaatgggggaagggcgaaccatgcctggttctgaacacctacctaccctgcttcctggaaatcgtgagctcagggtcacctgaaaagaatctactgcagatattttgctagaccagtgtaattctttactacattctaagtcttagccacaggtaagtgtagctatcagccctcatcaaagaagcccatctatactaaatggagatcatcacagaaatcagtggatcatgggcagagatcagtggatcatgggagatacacagctatcagagccactgtttctgtggcttggggaacattgcagaagagaggcaaacagctagaataccaggaattctgctgtgaaacagtctctcctagaaatggctgtgtaaacaagcctggaaaaatgatgatatcaatgtacatatcaaagtgtacattcccaatactagatgaagaactacagcaactgatgactgctgggagaattagcctctcctagagatgagccctcttacaggttgtccaatgcataatggtcatccctgaaaccacacacacacaaacaacaaaaacacatgtgtatacccgtgtgcatacatatgtagcaataatcaaagaaaagaggcgctatcaatctgatagtgaaaaggacatggaaggggctgaagggacggcatctggcaagggctggagaaaggaaaggagacctaggagtccctacaggtgtgcctggccacgtccatgagagcgtgggcaggggatgtcaaagatgatgggggggggagaggaggaggcccggggggtgggagggaattcttaaggggccacagacacgtggagagccccttggctctagcctcgctagcttgctgcctctgggcacgctctggcttgcgtttggctggtgtttatctgaataaagatatcctaaccttacggactatagatcgtcttcacgcatgcaatacaattctatttcaattaaaaacataattttttaagaaatgagaatgaagtcgtatgtggtggcacaagactttaatcccagcactcaggaggcagaggcaagtggatctctgtgagtttgaggtcagcctggtctacagagctagtttaggatagccaagggtacagagaaaccttgtcttaaaaaaccaaaaatatcaaaataaaacccaccaccatcaccaccaagaaagagagaatgaggagggagtacagtaatttgagaggaggctgacgtatttgctcacaccaaagcactgcaatgaagaacccctgctcctctaatgcagcaggcccaagggcatgtggtcccacctggaaaggcctaaggccccaaggatctcagaaattctctaattccactctgctccaatatcctgacccacacttgtgattctatcatgtccattatcttcactgtgcttcttttacacattttttaaaacttgttcactcttctccaacttgactagctaggccagggggcagatcccgtgactggttttgctcactagcttaacttcacttacgtatttctcacttgactgactaatgggacagaagtcttctaagttcccacagcaagaataagtgtctactcattttttactaatgtattattccactgtagttttgtgcagacattttaataagacacatcaaaaattacaacaaagtgtcagtgtcacttaatctttcaattcccacctttcccacttggctgctttcctcaattttatagccactccaaatcattgtactactgtatcattacagtagtacaggtgaaaaacctgggcagaagataccaacccagaacatgaccatccatcaaaagacctcaggaaagtctagtgatgctgctttatggtactatttatgctatcaacacaaataagggaatgctttgcaaatgagattatttcccttaaaggttcaatataaaaatatagaggacacagaaatccaaaagtccaagtattaataagccccatgttatgtgctatagaatcctcagatttcaggcaccaggctgaattcccaactctactgttttatgttcagtgttctctgtggatgacaaagtccacatttggagtaacattatattctaatcaaaattctaccacttcaactctcagtaaaggggccaggccattgccaaaggactgtttacactagaatgatttgtatagtttgttatttacctctttaaactttcaacaagctattgccaaggctattggctgctctccacaaactgatagtaagggcctattgctgaagacaacacttagctatctcagtgaacacagagaagctgagcctaggggaaaaccaaataatcttgttctgctaaggaagatagcaatgaaatgactccaaatgacattctgttatatcaatagatcagtgcctcaatcagccatcaacagaaaagcttcttgcggtagatgggaactaacagagacccacaactagacaatatgcatagggtaagggactttggaatactcactcctaaaagggatgtctttatcgatctctcccctcagggttcagggacctaagcaaaaagattgtaaaaactgtccccagacacaacaggactgatatatatatatgaactcacagagactaaagaagcaagcacatggcctgaataggtgcaagccaggtgggtcctctctgaaatggggaagtgggcacaagctcccacccctaaccaagaagctatctgcaataggtacccaacagcaaaggaaacaccggtcttctccaatggagtctcactgagtatattacccacacttcagagtaggttccatgcccaagagtaacagcagatggtcaacacaaaacaaactcaatggtaattttgcaggctttttgtctcatagtgctttgtttgggcacttcttgtcttattggtctcttacttctatattttgttttctgattttatgtttttgtgggtaatcgtgctcacacacacccacataggtgagtttcttggggttttgttatttattctttaaaaagagaactaaagggcatggtgttgggtgggtaggcaggtgagaagaggagtctgaggaggggaaagtgtaatcagactacagtgtataaaaaaatttaaacaaaaaaggcaaaaaaaaaaatctcagttactctttctatggaaaataatccttctctatagagtgttctaacaatgttaaataaatggtaaagtgctatttcaagtgactaaataaaatttcagggttcatcagaaactagttatgtattcttccacaatcttttggttttcttcaaaacagagatactaatttgggattttatttcaaaatttgtttcaggacataaaatttgtagtagatagaaactgggagatttgtgcttttatcttatctctcgttgttggccatttttgctggggagatccaaatataaaaacaatgcacaaacgttagggtcggcaaaacaaaacagactgtgaaccatttataggtatgtgcaggtacaatagcaaacaaaatatgcttgattgtccactctagtgtgtggctcttcttcatggcttcatggctcttctcccaaagcatccgaagtccaatcactcttcactacctctatcccaaatctttctttctttctttgaagcctatgtcttataggtggtgtgtgcgtgcgtgtgcgtgtgcacagccctaactgatccaatgtttcttgaacctgccaagtacattctctggaaagttctttccatatccctacagagctcaatcccctaaagtttctgttaagatggcatagagaagctgacatgatgtcatataaaataaccccatccttatctacaatggttccttttcatgccaatcatcaccaatatggaacacatttattatatgctccctttcctagaatgtaaactccttgatcagagattttattattattttgagaactcttgtatcatctatatttagcactgtacctgacacagagtagataataaatgttttcaatgacaatttattattaactgttcaagttaaatataaggcaacgacaaattaactataaaagacatttcatagttaactgctaattgaacagcatgagccaattactatctcagaggggtacccatcagcaccactagacttattttccacagtatatgtgaccacagttgaccacaagaaccagtaggtatcagtttgttcaaacagctttcaataaaattccgtttttaaaattatgattaaattatatgtaacataaaagttgtcattttaatttccatgtgactttatttggctcatttctttgaaacaatgagtatgaatcctatgttcatcagggggagatgagctcaaaggaagctttgaaaaaaggcattgctgctatatgagaaactgaactggctttggaactgaattcaggtccaccactcccgtagctgtgaggcagagttagtgaaacttcctttacacatatataaaacgaggacaatctgaatactctctcccttacacccactccaaactgcttcaagatattgacaggagacaataaaatcttagaagttcttcagcttcggcagtattacaacagtctctaagttaccaaggcaactacctgaaagacaggtggtggtctatggacaacctacattcccactaggttctcaggaaatgctgagagtggtgtgactggtgaaggaatcactcataggcatcctctaactccttcagggtcattaaaaaaaactgaaaatagttcacgttttgcaaattcataactaattaaagcctttaaagaacattttacaatctggttttaaaagtcaacatatattaagactcaacttgtaggaaaacctcatgcttacgacatcccagtgataaatattccgaaaattaacttgtaaataattccgagactgctttttaaaacttaaaatccaggtaaaaccagggtgcagcagttttaaaagaacaaacacagataaattttgacgagcagatgacataaagatacgtacatgtatggaggcattctgtcactgttgttggcttgatcaggtatcctttacagatatagcaggtgatgtaagggttgaagtctttcaccaagtgtttcctttgggtagccattcgtggttagccggctttagcagttcaggcaaagaggggaactaagtggatgcaaagctggtcccagtggctggcacaatgttctcggtagaggtcctgaggcatgagcatgaacatccagcctgagtacagaccactggtcatcactccctttgacagtcctgctttttcatatctgtttccaaaaccatagagagaagggtgagcagaacataacctttactgtccaattaacctataagtctattacaacttaactgagtaacaaattcacccagttccaaagcctcaattatcactgccgctcatggcacgcaaagctacggagtctacctggagtagatgataggtgcattctgccaatgcaaggtgcaaagactcaaaagttaagtcattaacccacctagcaaaatgatctctatttctttcggcactctccttctagttaatagtcatatcaagctgacacccatttcctctcctcaaagagatgcctgccgccctccagtcaggccagcttatatcttgctaccaggtttattctacccattacatttagtgctttctcaaaaaatgtcaggacctctcttcactaacacacaccaaaaaaaaaaaaaaaaaatgtgttttttagcctgtcccatgagatagatgtaaaccacactcctggttgattttgatcttcccttcaaaacttcaggtaggctgacaggatcactcctctctatcatggattctgctggctcgtatcttacacgcccttcctcttaagagctgtatcatgcttgtccctgagactccctctccaatgctgtcctcaatgtaatctctactaatgctcacgactcccttgttacatttttcttccattttgataattcattcattcttgtttttccgaggttgagtttcttatagcccaggctggcctagaaccctgatgagataacctttaattgatcctcctgcctcattattcacagtgctgggattacaggtattcggcattgccagttgacaccatgacagggaacaaacttttggcactgtgcatgctaggtaagcactctaccaacatttattctttatctctattagacagaaagtttcaatagaaaccggtcacacatagtagatatataccctgggaaatatactttctttaagtctcaagtggctatttattttgttgcttttaactgtaaagtaacagtaagagctccaagtacctagagaggagttatgcaatgagacagtacacagcgaaaaactgaagaaatgccatttattttcttgcaactttatgactagatagctcattaggttattctaaaagttttgcaagttccttacaagacagatgtccttagaaaacaatgccaatgaagatgcttatttcactaagttcattctacaccaagctcattcttcagacgggaacttttctcctaccttggctgttagtgcataggcgagtataaaataactggaaaggtctagaaggcatcgttctgccggcacacacccaccgtgaatgttcacggcaataggctccgagcgtctatcccttcggggaaatggtgttaaggatgtgacaggaggtgtaatttaattaattgcaatctcaagattccggccttagcccttcgtgaccttcagcaaagcattgatatcctaacctgggtctccgctctttcctcagcttttcttttctcccaggactcactggtgcgctcgcggcaaacctgtgggaaacgcagccccgatccctgtcacccggactccgaaaggaagcgagtgcttgcggtgtcgcgcgggcggccgggggcaacttttccgcgtcgggaggcgcgggtcccgggggttcaaaccctcccgccgcttagcaggtgctcggcccgggagccggggccaccacccgcgcggggaccgcgggacaggacaagttgccgcgggccggctgggccgcccccgagcgagcgcagagccggagccccgcacgcccgccccgcccccgagcggctcgggctccagcgcccggcgcggcaggtgtctgggacgccgcggccgccggcgcaaacttggcgcgcggccgggccgcccccgcgcggtacctacccggcggccgccgccgctcctcagtccgccggcgcgcccgcctccgagcccgggaaagcgaaagagaaacagcgcctgccgcggcctgtctggtccccgcgccctgtccgccctcccccagcaggcgggagcgcgcgggctccacggggccactcggctctggcgcgatagggcgcggcgggcctcggggccaagccggtgccgcctccagggcagctccacccacctccaaccgccagagccccgcccgccgccacgccccaccccacccctcctcgtgggcccccccccccgccggccacgccctcagccctggctcgctggctcgctcgctcgccggtgctcctcctaggcgcctgggccaccctgccttccctgccccccacccctgtcgctcccgtgtgacacgtagctgtggccaaattttatctctgttcttcttatcctcgtcacccatctctcggctgttttctttataacaatgaccagtgtgttgttttttttttttttttttttttgtgtgtgtgtgtgtgtgtgtgtgtgtttttatcctggcgggatcaaaagcaagggtcagtgttgatactgagtcctacctcactaaattttctccttgggttcagcgagatggctcagccggtaaaagcccttgctgccatgcccgagcagcacttgagttcaagccccagtactcaatggaggaagatgggaacggacagaacgactcctgcaagttgtcctctcacctccacaagggcaatgtggcacaagcgcacccccacacatccatacaaataaatatgattttaaaaagtatatgtaaaagccgtgtcctgtcaggcattgttcctcacacagaatccacggggttgtagtggagatgaagacgtatcttgatacgaagcttatttagaaatcactattgaactcattgcaataaaggtgagtccagcagtcacgatcactgacaaacgcaggtaaactggaaatttgtgtagggagtgatgacggtaagtggtaaaaatttattactgtttgcaaggttctaaacaaacaaaaacccccagtgctctttctaatggactttgagatttctaagacaccattcattgaaggaaaagaaagatgccttgaaaggcttcctgtactcttcattcaaaacttttctaacacttttcctaaactcaaattcctaataatacaactgtgttaagcattagctagacccggtccttcccttcttaaaagattatgctcaaggactcctaggatcctaggcaaatcaaggtagccttcacttactgaccaaacataaaaggagcattttctgaagggcaaactgcaaaggcaaccttggatctcacacaccagaaagaaaaagagggttgcaatcccaccatctcttttgtaaaaaccagagcaaaggttgctaaagaattcacagagaatgcggagcatttgtgttatcccctacagacaagtagcacctctggctagtgacagagtgcagagatggctggaggaacaaaccaacaaatccaggcacacaggtgttcagggatacatctcaaattaaaaactcaccaagtagaacaagaagctttaaaagctacccacattataattaaactttgaaggtaaaacaaactcatttgaattttgccacagcaagaatacatctttaagtgatttctctataaccttcttaaagacccctttgcaaaactatgattccaggatgggatgacttccacaagaaacagcaatcacagtaagcaaaagaaaacaagtcaggtcaggactattggcttcatgtctttctctctctctctctctctctctctctctctctctctctctctctctctctctctctctcttccttcctttttttttcgagacagggtttctctgtgtagctttggagcctatcctggcactcgctctggagaccaggctggccttgaactcacagagatccgcctgcctctgcctcccaagtgctgggattaaaggcgtgcaccaccaacacccggcttggcttcatgtctttcaatctgaatatatccaaacaggaaaagccaacctatgtccagtctacttaaaatatgcaataaaaggttctactaaaatattaaacaggggatatcttgctgtatacattgcagcatatacaaaatgccttaaaaccgttccagtttttgtctgaaattattttaaatgtctttttcaggagtaagagtttgtgaaactctaagaagaatgcaactggagatcaataaaggagctactcaatattttcagaaatgatcttgaccatggattcaaggaggttgtacactagagggaaggagggctcaaactaatgttgctggcagcccctgaagatggatgtggagatggagatgctgaggtgctggagcgtgatggtggcgctgagagacgggatggggggtcccatcctctgggaggaaacctgtgttttgtgtccctacacacaactatagcctaacagtgtcttagttgttgttctattgctgtgaagagaaaccacggcctggcaacttgtccaaagtggaaagcattttactagggaccgacttaaagcctcagagacttagcccattatcatcatgacagggagcatggtggcaggcaggtgtggtgctggagaagtggctaaaagctccatcctgacccctgtaggccaagagggagagactgggcctggccagtgtttttgaaaccttaaagcccactcccagtgagatacttcctgcaacaaggctatgcctcttaatctttcaaatccttctcaaatagtaccactccttgacgactaagcattcaaatatataactttatggggtcattcttagtcaaaccgccacagtttgtgatttattctctttagcaatcaccttgattcactcaccctcaaaaagaaaaacagcatgccccccccccaaaaaaaataaccaaacactagagcagtgctagggaagggcagtattcctgctgagtgtacattctaacctccgacttcacttttgtagcactaattctagttggtactactaataaaaacccagaggaagacattggggttaaagctgaagatcagagaagcagaagggccagccactggagttctcaactctaccaatgctcagaccgaagtgatcctgtcctcagactgcatcctcagactgcttagactgcactgctcctcagactccactgttctccaccaaacctcagactgcactgagctcctgtctgctcgtgtcttatattctctagtgctgggattaaaggcatgggatcccaagtgctgggatcatctttgtgtgagctgtatctcttttagcctggatcgaattaacagagatttgtctgcctctgtctcccaagtgctgagattaaaggtgtgtgccaccactgcctggcttctgtggctaactagtgtggctagctctgcactctgatcttcaggcaaaattattaaatcatacacaaaatatcaccacacattttagagatacaagaccagcaccctgaaaaagagcaaacctataatcacagctgatttgggttgcgccaagtctaaaacaaaaatgtcagttcagttttgtttacacgtctaagaacttctcaagcacaagaagttctgggatatatattaaacaaagtaacttagaaacgacccaaaaatgtatggagaaaggggaggggaaagcaagtaacagcagctattttcactacgaattaattagtaagttagtaccaactggttttaatggtataactttcttgaaaattagggtgatatattcccctgagaatttatatgattgtactgtgaaactccaagactgtgttaataaaattaaccttagatcaagggtctgagcctgggactagttgataggaattagctataaagaatagagaggagccagggatatagacagagagacacacagaaagagcaaggagggacttaagggactcaagggcccttttgatttgggatggaaagagagaaactctttttctgggtctccagccaaatggaaggccagctggttgcttctcagcctctctgagctaacaggttttcaccccagtttctgacttctgagtcttcactggcaaataaggaaacatagataaaaacaatgttggctgctgggcggtgatggcacacaactttgatcccagcacttgggaggcaaaggcagatggactctgtgagtttgaggccagcctggtctacaaagcaacacagagaaaccctgtcttggaaagcaaaacaaacaaacaaacaaacacaacactggccttttcattattttaaattattttatgtaccccaatataatctttttaacagagtatctttaacatataagctaccttctgtaatccaagattgcagaaaatactaaaatttaatgtaagtattttattgggcctaagtgcctttatgacataaatattacagctcaaaattaatgatggcctagaattgatgatgaagagctgggggggggtgctgagaagtgaatgaaggcacagtcaggcatccttgactatgtctccttttctcactatgcccgtttccataatccaataactgccaaggactctctgccccgcctctcaaacccccagccctgcttgctcaggtcactagcatctgttccgttcatatacaccagattctgaatcagtatccttcagagctgttaccttgtggtcctcagtagagtcacaggactcctaactacagtgtgctacatcctgcctccaccttttaaaaagccctgtgttattaagagaactctaaaacacctgataaggccaccccagatgcctgtcacctccaaagcccccactcgcttccatgattcaagtctcagtggatctctttgacttcttactagctaaatggtcttcttacagtttggtagcccaatctaatcccttcagtctttcctgcccctgttaaatctgagcagtccttacgcattttctaggtatccacttattctgaaggatatagctcgtggagatatccaaagctctgaggagccttctctgtgacacagaccatacatgcatgcatatggcaacacattttcttacatgtgtctgtgtgcattgtgtgtgttttcacctgtgtaggtacatgtgtacatgtatgtacatgcatgtggaggcccaaggccgatactgagtatgttccttgatcactttccaccatattcattgagccgtatttttggttgtgagcccagcctttaacagctgagccatctctccagcccttgagccacattttaaaaggaatctagagattgccgatacaatcagtggggcatctgtctttgtctcctgagcactggacttgcaggtgagctgacagaactaccctgagtttatgtggacacaggatctgaactctgatcctcatgctttgcctgctgagtcacctcctcagtacccagcaccactttcaactctgacttggaaggtccaatttatttagtggtctgaactagaagatgagcccagtgcatttgtgtttgcaccgaactatgcacccccagtgctggtgacagcaaacagcaaacactcaaagaaatgcttatttaaaaacaacaacaacaacaacaacaaaaacaggaatagttccatcccatttgaggacggagactctattttttctttgatttcctctagggtgaatcttatcagggtatgataaaggtataatccctgccttctaggatggttaattaaaatcacaacagggagtggagacgtagccacaagaaagaattatatagaaatataacaaatttgttagtggcattaaacaaatcatgaccaatggcaagaatgccaggtgaaaaggggcagcactatgccggggtcaagagctcagtcccatgagcccaccctgtctgttagaaaggtcataaggcacaatcccaaaggctacgggtctgaggaacaaatggaaaagccatcaaggaggagaaacccagtacagtagaaacaagcagagaaaggccagagacaggaacaagaccaagagtctggaacagtaaatatgttttcttttttgttgtgtatgcttgtgttatgtatgtgagtgagcttataggtcggaatcatgtgtctcaatccctcctcaccttacctttttgagacagcgactctcactgaacctgagtcgtaccaattggctacactagctagctagtgagctctgggatccacctgtctctgtcctcactgccctaacaaaatccagtttttacatgggtgctggtgacccaactcgggttttcatgcttgtatggcagttgctttaactactgagccatctccctggaaaatattttaaagcactagaaatgtactatgctaagatgaaaagtcagcattttttttccttctttgaaaagtgtggtggtggcgacaggggtggaggggtgttaacctatttttctttactgtcttgttaatggctggatggagcaagttccagtaattctcaaagaaccgaggagctggagagatggctcatctgggaagagcactggctgctcttccagaggacctcggttcagttccctgtttgaatttcaactagtggctcacaactatctgtaactttagtcctaggggatcctattcctcttctagcatccatgggtactgcacacatgtggtgtacaggtgtacatgcaggaaacacactgcctcacaaacacacaaaggacagaactgaaatggtttcaaactgtaagggacactggatttctccaatcatcaggcctgtaacatttcaagtcatcttcatgaaactgcaggaggttaaagtcctgggatagtaaatgtacaggagacttaaaggcagaaactaagaacaacccccaaatctccaggcagagtattctaagtgaggagacactgtgaaactccagtgatgtcaacaaccaaataccaaaaggacaagttccgggaaaagttttgatttttactgatagctggggattagaattaaagggcagattagtggcaagagatgagttttgttttcatttattttaaaaatttatacttatttagcacacacactggcctgtgtgagcccctgtgctgtggcgtgtctatgctcacctctacaggaagtgaccttcacagcagggacaaactttagaagttggttctctccttttactataggttctgggatggaactcaggccatcagacttgcatgtcaagcactttttcctgatgagccagcttactgtctcaagaacctgtattgtggtagggtaagtcagctctgtgggcttggcatccttcatatgaaaatggggattatttcttcctttggcgaagggaagtatttgggatcaaatctagggcctcatgctgggcaagcgctctgaccaatgagctacatccccagtagaacactgatgctatatatacttagctattatgtatgtgcagggaagatcttcattatatatcttattataacaaatatgattgggatgatagatgaagaaagaaagcaatggccagaaggtactccttcctctatccctgaatcacactcaagtgtcctgtagccgcccccccccccccccggcccgccccagacaggatttctctgtgtagccctgcctgtcctggaactcgctctgtagaccaggctgccctcaaactcacagagatctgcctgcctctgtctcctgagtgctgggattaaaggtgtgtgccactaccgcccaaaaagtttttttgcacactcaagttttaaaactaagatgggaaattgtaaacatttcactaggaaacttgtgtccttaaaggttttaataactaggtcaacgttaagaattcacttacttccctctaaacggggtagtaacacagaattctccccccagtaagatacagattctccatacaggggtgggtgtcagagttaatgagtcctcacttgagctctatctattgttcccagatctgccaggattagcagactccgaagtccaaagtaagaaaggccctaggagaagacaaggcctcagcgaggagtccacagttagcagttgactgggcaggaatgcagtgctgatggcaggcaggcgccagcaggaggaagaggtaaacaggagaaggcaaagcaccaagctcttcttcctcccattcacaattccatcttggaccttgaagctcagaaggcggggaagaggaagaggaaaaaaaatcacttttgttttgttttgttttttcgagacagggtttctctgtgtagctttggagcctatcttggcactcgctctggagaacaggctggccttgaactcacagagatccacctgcctctgcctcccgagtgctgggattaaaggcgtgcgccaccaatgccctgctaaaaaaaaaatcacgcttaaaaaacaagagttaaaattagtttatctgttgttttcaggtattcaggtagttaataattgactacagtacaggttgtttttgtttttctgtttgtttttctccctttctttagatttgtggaaagcaggatggggtctaatttaaagcatgggctaaaatatcggatggaagcctgtagctcttgaatttctgaatcatgaacctctgaagccaccgtaactagttcaaggagaaaaaaggcatctgtcttgaacagttatttctgctgggaggaactatcttagtaaactagagaaagtctttcctggtacaaaatctgtaaggtcttcttaacaaaaagccaggaagaacgcaccagcttcaacacaccttaagtaaactggctccatgggcatacagagagccgggcacaagctctgcaagggcggggcatctgccaccattgcagatccctaaaacacaacagattcttgttaaacgtttgctgaatggatccatggacaaacaaacaaggaaagaaatggtgtccacctttgcacgcaagactgcttatgttcaaatcatgatacaaacaaccatccatacctgttttcccatcacttaaatggccctagtagaaagaagtacacatcacataggagttatgtgacacacgtagatcatgccatggatgcactgactacagagtcaatggacagacacgttctgaattaacttaaaattcctatatctgtactgttccctactacggagatacaccaataatggaacatttggacatcatttaagtctctggttccaaacaaatccataggacaatttcttcatatcctttgcttgcttttagtatacaacaggaggaaaagatatttgaccaaatgtatctgcaatgtgtctgctttccacactccaggaatttaaagctaaggtcactatttatgaggcaaatgagtacagtaagtcttggttaactggttatcacacggtgaaactgagagccatttctcaatttatatagtctagtttcacacatattcaaaagtctacttccctgcctggaaacgtcttaggaaggcagaactggctgaaacatgaaatatttagaaaacctaactgtatcagttatattcttccctggacaatgtttatacaaacagagaaagaatggtcaacaaggagcaaagaaaaggagaaacactaagattttgagtatcatccatactagttgtggctaggagatgctgagcctgggcaagcactgagctagtcaccagggcagtatgttttaacacttcccgggagcagtccatcacacctaagtggccaccattcctctccagctctgattccagccctctgagcagtcctttattgtcccttctagagatagtaaacttgcgctacatagtattcgtcttcctatgtttgatgttttgtctgcttgaaaattttaaattagagaattctcaatagaggaaactcagatggctgagaaacacttaaagaaatgtttgacatccttagccaccaggaaatgcaaatcatattcatcttacacctgtcagaatggctaaggtcaataacacaattaacagctcatgttggcaaggacacagaacaagtggaacactcccccattgatggcaagagtgcagacttttacagacactatggaaatccgtatggcagttcctaagaaagatgagaatctacctcaagatccagctataccatttggacatatacccaaaggattcttcatcataccacagagacacctgctcaaccatattcatggctgctctcttcataagagccagaatatgcaagcaacctagaggtccctcaacagaagaatagataaagaaaatgtgatacacaatggagcattactcagccattaacaatgacatcatgaaattcacatgtaaatgaatggaactaggaaaaaaaaatcatcctgagtgaggtaacgcagaccaagaaagacaaatgtggtatatactcacttatatatggatattgcctatcaaatcagtaataaccaggttacaatatgcagaaccacagaggttatgtatagagcaagggactgggggggggacaacaacaacagataggtctcattaagaaagggaatggaatagttatggatggatcagggggctggaatgtgatgatcaagtggggagtgggtgggcgagggaaagaagggagaaatataggtagagatagctaaaattaagggcctcaattccatttgaggggtagtatggaaacctaatatagcagaagtttcctaaaacatacacatttgtgaaagtgatctaaatgaaatcaccaaataatgggggaggcagatacccaactggtccatctcttgccagcaaatcaagcttccagtactaggaccgggtacatctaatagagttgttggccaaaggggtcccacaggaatattcaacccaggcaaagactatataggttgctctccacaaacttcaacaaagcccaactgctgaggacaacacttacacaactcactgaccatgaataagttgagcaggtgcctacctagagccttcagccatttgtgctagtgtctttggtataggaaggtactgcgtatgctaccaaataagtaagtaagtaagtaagtaagtaaaagtaaactccaagccagccacagatcttttgatctacacaatggtatcctggctgcaagatatgctaagggatttgtggtggcacaaaacttgtgggagtaaacaaccaatacctgatttaaggcccactccaagagatgaaacccacacctgacaagtgcaaccaagaaccagagattaggtagcttagggacttaggctaaaaccaaatattactggtgttaaaaaaaaacaaacaaccaaacaaaaacaaacaaaaaaccagcaataaaatgactcctaatgacattctgctatatttatagatcagtgccttgctcagccaccatcagagaagcttcctcccgcagcagatgggaacaaatatagagacccacagccagacattgtgtagaatgaaacaccttgtaacaatcagccctaaatgaaacatcccttctctcagggctcagggaaccccaaggaatgtaagaatgtaagagacagaaagaatggaggacaacaagaaatccaggccctataaaacaccatgctcaaagctcatgtgagctcatacggagtgaggcagcatgcacagggcctacatgagtctgtaccaggtcctctgtgtacggatatggcttccagtttagtgttttggtgggactcctgagtgtgtgagtgaacgggtctgactcttgtgtcctctcttgggctcttttccttctatttgtcttacccaactctgatgcactacttttcattttatcttgtatttttctattatcccttagaagcctgtttgttttctaatgagagacagaaagggagtggatctggatgggagggcaggtggggaggaactgggaggactagaggaagggaaaactgtaatcaggatatattatgtgagaaaaaaaatctattttcaatataaggaaaacataaacaaaaagaaaaaggcaaaattgccaaccaattgtaagttccccagcaagtctttttcagactctggatttagaaaattcttttagaattgtgataatcactaagaatccttccagatcttcaaattacgtgcttgggcaatttgaaaatattacctcgaggagggacacattaaacatcgtgttgtgttgtgtctatgcttatatgtccgtgtgtacatgcaggtgtgtatgcctgtggagaccagagatcaacgtcaggacccctcctcagtgacctcatttcaccttatttttgacacgaggtctctcactgaacctggagctcatcattctgtctagtgttctagtttacttctaacactgtaacactctgatcaaaagcaacatgggaaggaaatggtttattgggctaacccttccctgtcacaatccagcactgggaggcaatcagggcaggaactgaagcagagccatggaggaacactgcttactggcttgctcctcctggcatgtttgatttgcttgtttaaccacctcagcactgcctgcccagggatggcctcttatagtgggcttgatgcttccgcatcaatgaatcaatcagtcagtcagtcaatcaatcaactgctctaaaggcttagctataggccaatcagatggggacattttctcagttgagatttcctcttctcaaatgactctagattgtgtcacattataaacaaaacaaacatagcaaagctggacgggaaatgtgctcaggggttccatctttctctgcttccccagtgctgggatcaggtgcatactagtgtccagctttttgtgtgccttctggggatccaagcttagattttcatgcctacaagacaagaactttactgactgagtcatcttcccagccccacagtgctcattttaggttttgaggaccacagtagtttctaagacaactactgaactttgccaaggtaagggaaaggctgccaagtcaacacgtaaatataggtgtgctcccaggcgttggtggcacacgcctttaatccaagcactcgggaggcagaggcaggtggatctctgtgagtttgagaccagcctggtctacaagaactagttccagaatagcctccaaagccacaaagaaaccctgtctcgaaaaaacaacaacaaaaaatataggtgtgttcaaataaaactttattaaaaaaaaaaaaacaggcagtgaactagatgcaacccttgagcagcagcttgttcatgcttgatctgaagaacattttctgtggactttaactgttggcaattaaagtttctgacaactctaaaaaattattccaacttataacatggtggtacaatgtctatcattatatgatttcttatttccaggcaatagataaagtacagtgttttcaaatgatctcatcatcatcttcaccaccaaatagcccagggtgttagaagctattgttttattctactctgctatggtttgcaatttgaactttctcctgtgatataatgaaggaaatctttcaagaaagtaatgaaaaatgttaaacaaaaacattctgtcctatttgccaaagatcttgacatcacacctctcatttcaaaatattcagaaaccctagtaatgtttaaaggtttcattcttccattctgtccagcattctgacctaagagaaagcaggaaactgacgtgatcttagcaagtcatgctggcatgccttttttttttttcaaaagccaaatgcttttattgttcagaagttattttttcccttcttttttttattttttaagaccttacatatttaatacgtgtgtacaaatggaaaaaaattaagttcaacatttctagaccaatgtggctgttaatttttgtacaatgccaactcaacacagtaaactgggatacttttttccaaagttgacagcacatctaaagtttccaaaaattcaatatatatatatatatatatatattatatatatatatatatcaataatggcagtatgttatgcatcaatagcatcaacagcttttccaggttctgcagtcatttgaacaaattgtaaagacatccagcacactccatttaaaaacaaacaaagaaacaaacaaaaaaacaaaaaaaagtaaaaaacaaaatcccagatgctgttatctggcatgccttttgtggtagcttcagctcaccatggctgagaagagaccctgagggccaaggtggggagaacccaccatctcttcacttttgaaaatcatcagctgcaaccaggtaggggacatctgaaaataaggacactgcagttgtggaactagatctgccttgattagctggagcgaaggaggtatgctctcacttgtgtgattctcaacaaggagacttcagctgaagacagatacaacactctctactcctagcttttcacgatgagtataatatgcaatttcaaggcactctgtacctgaatcaccaagatgaagacccatttattacctgtattattggtgagttataagaggctttgatatcaaataatttcaatactgccattttaatttactaaattaaggaagatgctcccaaagcattcaaagagaagtaaatccacatactctatccacttagctttcaaaaagcaagtgttaagagctactggtcctgatttgcatttacaatgatatgtcacttcctcaaatgctaagcagatgttgaatgctacaagctgccagggaagttcactgggacttggaaactgcaagttggtaaatcatcatttccctcagtgtctccttaattctttaatccatttgacagaggaagtctcaagttttaagtgaggcattcacttctactagaaggaaaactttctgtaattggaaaggaaatgtagaagtgcagacagacacaaggtctgtaaatactgatatttacaggtcttgatgtcacttaagacagttggcattagaagcatccaacaacaaattggtcattaacaggccaagtaagtagaatttagctttttaagaggtgacttttgtaatacacacacacacacacacacacacacacacacacacacacacacacacacgcgtgtgtgtcacagttatgtaagtttcatgtctttcttcttggtttactaacctcataactttaatatgccacatcaagtgttaaatgttatatgtcaagtattaacatagatttatttcaaatgccagttgtgggtaactgtgcgctctccaaaagaactttcaaaacctttgagtctagtgaacttaactttctttagacataagttctttaaaatcgataaccaagtgacagtgagctcggcagtcagcctcttacacaagaccagtaccttctaagaaaggggagaatgttaagtgacaaccccagggatgtgcccaccaacaggaggggctacgtctaactgccttttggagttagaaaaagctgaaggaaactgattaaatttagaagcagggttgtatgaactgggagagatctgcccagccacataaaacacacagccccaagtaccctgtaggatgagttagcattgcggctggtgtgatttacagacgacctcagtaagactagaggggcacaggggatgaattgactgtccggagggctaaagggctgcagattcatatagcttacatctggagaaggaaaaggaggacattgatccagaggggtttaactgaagtaagtgaaaatgaagtcctagtggctctctgttcctattagtgactataaaccaaaaggattgctgcaaaatctaactacattagagttactttcagatatcctttcggattagttcatattaatcagatatttctatttgccatggaactgatttgcactacagatagccaaacagttactgtaattgcttcaagcacatttatacaaatttcttcatacatgcatagtatagtttaaagacaatacctgaaaggtagatgaactttcttaagcattacagagaccttttttttttttttttgagacatgattttactatgctgcccaagctaagagcaagctcactacacagcccaggctggcctcaaattggcacccctcttgccttagcctcctagatcagacattatagctactcaccatcaatgaccacatttttaactggttcatgatcaagcacagcaatatcaagacgagcagcttcctgatatcagaaaatgagaggtatgcttggaagttacttaaatttgtaagtcttgacacttgaaaacacttaagttgtatgtaagaaaatccctttgccagatatggaatctaatattcaaaataatttactatttccatgcttgctcaaaagatattttttaaaaattttattatgtgtatgggtgttttgcctgcgtgtatgtgcaccatgtgtgtgcctggtacccattgtggccagaaggtgttagatcccttggaacaggagttacagacatgaaagctgccatgtgggtgctgggaatgaaaaatggggttctctggaagagcagtcaatgctcttaaccactgagccatctctccagtcccctctaaatcattttccacttcccagtatgagtaattttgccactttctgtttctatggtcattggtgaagaaatttaagtgtatttctttgtggctgtttgtgtgtttatgtgtgcctgtgtttggaggccagaggtcaacactgagtattttggctcactctctctccacctctctctccaccttatctttagagatagggtctcacagagccaggtgcttatctactgagcagactggctggctggagctcaggacaccttcctgtcgccattcccccaccccccaaatcaccagggctataggtagcctggagcactcccatgtttttccttgctgggaatctgccctcaggtccccatacttgtgaggcaggtgctctactgactgagcccttcccccaacaccagcaagtatatttccaaatcttgtatagtttggtattgttgctgccaaagcactttgttttctcccctctgaatgggatgggagaataagccttagagtgtaggatgctcgagaagaccctagaataaaccagagatgtgatccaaactaacagatgcaaggaacgcaaaaacatgggaaagcaagacagggtgacttctccagagcatggtaactccccaaccactaacttcaacttaagtagagtgctgggtaaagaatcctcagtttactgtaaaaataactggcaatgtgaaaaaggacacagatggatggatttgatctaggaaaggcaacaacacacaggaaaagccagcgaaatatatgaaaaagtcccaaacagggaggacaaacacagcaaggaaagtgagatttagaaacaaatttgaaatgttagaaataaaaactcaaagaatcaaacagaaaacacagtgaaaaaaattaccaatagactggaccaagcacaaggaagaataacagggatggttatactatattcaagcatcaataatgacaaaaataagtgagcatgattatactgcgtaagaactctgggatatgatcaaaagaccagacttaaaaaaaaaaaaaagtttaggttagagctataataaagcctaaagacttggagaatctattccataaaattatagcataatatttccaaaatctagagaaagaaatgtatgcccaagcagaagaggcatttaaaatcccaaagacatgatcaaaacagaaccttgccatgacatattcaagatgcctagagcacacagcagccaggtgtggtggcacacacctttaatcccagcacccagggaaggtagaaacaggctaatttctttgagttcaaggtcaccttggtcaaatagtgagctttaggtcagtcagggcttctagtgtgaccctgtctcaattaaaaaaaaaaaaagacacacacacacacacacacacacacacacacacacacacacacacacactcaaaccaaacccaactcatttataaaagcaaatacataggagtaacatcagatcttacaacaacagaaaccctagagaccagaaacaaagagcaatatatttcaagttatgaaaacaaatacctgccaaccaactctattatatcctgcaaagctttcttttaaaattgatgaagaaatagtaacgttccaagataaacacaaacgaaggcacagtcatataaaacagaaagaaaaacgttctactaaccaaattcattccataaagccaacattaccctgatctcaaaactggataaggatacaacaacaacaaaaaaaagaaaattacatgccaacgtctctgatggacatagatacaaaagaaaagaaaaatctcaatacaattctcaaaacccaaactcaagaaatacattaagaaaatcatgcatcataactaaggtgggtttatttcaggaatgaagactgttcaatagatgaaaattaataaatataacacagaacataagtacatttagggacagaaatcacacaatcatttaaattgatgcaaaagagccttagtcaaagttgaatatcactccatcataaaaaccctaaaaaaaaaaaaaaacaggataacaaggaacatattccaacacaataaagacatgtgcattaatcacagttctctaaagtagcagaacttagagaatgaatctttctatatatatacattgaaagggaatttgttagaatgacttacagggtctaatcagtccaactatcattgccattgaacagaaactttgagaacctggcagtcgttcagtccacggggctggatgtctcatctagtcttcagtttatgctagaatcctggagaaatgggctcctgccagcataggaaatggacttgccagtgaggcaagagcaagcaggtaaagagcaaagacttccttctccatgtccctagataggcttctggcagacgccgtggcccagatgagaggtgggtcttctcacctgaaaagatctggattagaagtggatttcccacttaaaattaagcaaaaccccctcatgggtgtgccccctccatttttggatttagttaactacagatgtagtcaaggtgacaaccaagaataaccatcacaccgcggtatggcaaacaataaccaacgatatactaaatggaaaaaaaaaaaagggcatttcctctaagatctagatttagacaagtgcttcctctcttagccagtgcacggcttggcttaaaaatcttagagataaaagggattcaatataagaaagacagatgacatgatcctatgtttaaaagacaccagcaaactctgacattgctaaatatgttcagcgcattagtagaacagaacatcaacaagcaaaattcagtagctttttaaaatatatatacttataatggatttgctgggaaagaaatcagtggggaaggccagtaaggcagtagaatctttgtgagttcgaggtcagcctgtctacaaagagagttccagaacaggttctgaagctacacagatcaaccaggaaaattccctactcacaacagggtgtggggcatgtaaacagaacaaggggagtaaacagaagccatatgcaagtatgctgtcttagaacccaaaagagggactgaagacagtcatcccgcatggctggatggcgatgctttcagaagcagtggcttactgaacatagttcccaccgagaagttggtgagggaagcctgggccccaatcaatattggctcttctcatccctcttcatcgctatgctgcttgttgtttttgtcaactcaacacaatttagaaatatctaggaggaggaacctcaactaaggcactgcctccatcagactgtcctaaaggcaagtctgtgaagcattttctttattaatgattgaatgggaggacccagttcattggggcatactacccctcggcagggagtcctgggtgatacaaaaaagcaaactgagcccggtggtggtgctgcatacttttaatctcagccctcaggaggcagaggcagaaggaccactgtgaacttgagaccacagctagttccaggacagtctccaaagccacagagaaaccctgtctctaaaaaccaaaaaaaaaaaaccaaaaaaaaaaaaaaaaaaaaaccaaaaaaaaaaaaaaaagaaagaaagaaaggaaaaatcaaacaaaccgagcaagtcatgaagaaaaacaaacaaacaaaaaaacaaaaaacagaaaaaacagtaaggggtgttcctgcctctgctttagttcctgccttgagttgagttcctgtcatgatggactgtgagcagaatgtgtaagccaaactaaacccctcctgtcttagggtttctactgctgtgaagagacaccatgaccatggcaactcttataaaataaaaaaaaattaaatgggtggcttacattttcttgggttcagtccattatcatggtgggacatgggggcatgcaggcagatacgatgccggggagttagctgaggggtctacctcttgccatgcgacaggaaggaaatccgtctcactggacatggcttgagcacatacttccacagtgacacacttcctccaacaaggccatacctcctgatattgccactccctttgggagccattttctttcaaaccacaacacccccaaaagttgttttgttcatagcgttttttttttttttttaatcacagcaacagaaagcaaaccaaggcagtttcccaccagagctagaggataagatcatattgtagaagatatcacacacctaagatgtaaaccatagagaaaaacaggcgaggcatgagctccaaacttcttccctgccggctagcattcaaaccaccaatctgagagggctactgcacaagaaattgcagcatccgtctcccagtgctgtgaactctgtgaaccagagctgacctgttaggcaagatatgcccacataggtaacagctttcctgctgtggggagaaccaactgccctctcattggttgaggcttgctctgaggatggggaatccatgcccaatactataagctgggctaacaacccaggtctggggaagtcaatggcccaaatgagtaatttattaatggcaaaattaaactcccttctaaatatctatgctatgtccccagacaaaagctgattccagcctttaccacagaagcctctccttacaatgaacacttgtgaatatggagacttcatagtagcctaagtgatggctgtgggctcagccctaaagagggcatttgcaacaccccctttaagactcggagaacactgtggaagaggggttgggaagtctgtaaaaagttggaaaattggttgaagggctggtaaaacaccatcctctaggctttatgcaaccatcgcaatcattaactcataacatctgtgatcatcggcagtggtcagcacaagattggtcctgtcaactatcagtcatggaaaggatagaggcttcacagggatcctaccctttcctgatgaacccctggctagatagattctgggagggggtacgcaattaagtaccattctgctgaggctctccgccaggctccagtgaatagcttcacatccgtggtctcacagacagccctggttaaactcagtaggccgtaaaacaaaacagagagagacatgaatgagaaagagatttgtggggaaagtggggtgggcatcagggtaggaaggtgggtgaggggtcagagtggtcactactatatagtgtgtgctttgtagaattgtctaaaaacaaacttaattagctgtaatactttaaaaatacctggaaaataaaactatctaatggagagaaaaaaaaagacctacaatggaaatttgaaaacagttatgacaaacactaaagacagtactagaaagtagaaagatcacccatgctcatggattaggagaattaatattgttataatgagtacattacggaaagtaatctacagatttaatacaattcccatcaagatcccatagccattcttcatagaactagggaaaaactatcctaaagtacttatggaggaaaaaaaaagcccacaaagcaatccttagtaaaggagaaatgctgaaagtatcacaatactgatctcaaattacattacagaaccacagtaaccaaagaggcactaaatactaaatactaaataataaggcactaaaaggatacttagactaatagaaaaaggacttgggaataaacccatgcagttacagtcacctaacttttgacaaagtgtcaaaaatacacaccaaagacagcctttttttttttttttagcaaataatgggggcaaaactagattcccaccccacatgtgaaagactaaaactacacctatgtcccccagcctgtacacaaatcaatttaaaacagaccaaaaaccctaatgcaatgactcacacagaaacctctagggaaaatgcaggtaaaacactcaaaacatgggaaataattccaagaactgaaaaacgggattgcatggaatcagaaggtttctacacagcaaaggaaaccaccaccagagtgaagacgcaggccacagcatgggaaaaaaagagcccagttaaatgccttcttttgtaagagtttctgtggtcatggtgtcccttcaaagcaatagaacactaagacatacatattcaaggaaatggattaaacggtacattatgttaaatgaaataagtccaattcaggaagaaaaaaatatctttttttcatctgtagaacctaaatttaaatttaaatatgtacacgtgtatatccgtatgtttatactgtgtgcatataaacactatgaaatcagaagcggcaccatcagaaaacaggaagagacagaccctaagggagaataatggtacacacggacagtgtggaaacaaaatcggagacctatgcacagaagggaaccagtggatagttagggaacccagagtcactgggggaggggttagggtatgaattagaacacagtatcacatgtatgtatgaaaatgccatgacaaaactcattacattgcatggtaactttaaaaattaatttaaaaaacaggagagagagaactgttttcatagagggagcaacgttccattctatttacttcccaaccagaattagcatgcattagtcattaaaattaggttctgctattcttctagggatactcatagttattttctatttatatttattcagattaattctctatctcatccccctcagtgcaggagcttctgggtatacaaaatgtgatacgggataatgctcttgtatactgcaaaaatttgtcactcctactggtttaataaaacactgattggccagtagccaggcaggaagtataggtggggttattagactaggagaattctgtgaagaggaaaggcagatggagttgacagccagacacagaggaagcaagatgagaattcctcactgagaaaaggtaccaagacatgcggctaaacatagaaaagaattatgggttaatttaaattgtaagagctagttagtaatgctgggaggtggaggtgatggcacacgcctttaatcccagcactcaggaggcagaggcagacaatctctgtgagttcgagaccagcctagtctacaagagctagttccaggacaacctccaaagccacagagaaacccagtctcgaaaaaccaaaaagagctagttagtagtaagactgagcaataggacaaacagtttataattaatacaagactctgtatgtttatttggggccaaacagatgcaggatggggcagggcaaaaaaccctctcgtctacaaaaatgagatgttaaaaaaaagtaaatacaacaaacttctggttctgccatgtcattcacttcctctacctgaccagaattaataaggttcttgccaaacaaccacagtcaaaaaaatttacatgtgattgttgctcaaatctgtgacctgcaggtgtagtggaaacagaacggtcttgctcaacaggacactcctgcacatccctgtacccgtgtctagaatccggcaatcaggaggccatttctcaaaccctgtctttaattccacacaggtcaatggcaaccccatgaagcttcaatcaaccgacgcctgtcacagccaactttccaaggtggcttctgttccccttccttgcccaacagctaagcatgaatttgttcaacatttcgcctgcctgttatttcttttattacttatgaaactccatgaggtaaatacagttattctgttcattatttgcatgacagcaaggatcacaggcctgcaatggatgaaggtgaagtggagcttggtaccgaggcgccaacccagtgtttcttagctctattctagagcattctgccgtagagcggagctctcagactctgcacttcccaacataaaaccttgctttttcgtaccccacatcccactctccctccatccctcttttcgtcagccatttacaccagttggaaatctgaatcatccaaaacagctcatttgtcctctccacctcgcaggactcaaccttctgaggactgctgtcgacccatgcgctccatactttaaggagttttgaatcagtatcgatgttcttgttctttaggatcagggaaggtggtcaataacttaagtcaagaagaggtcagtgcataaatcttgaaggtgtttgataaacgctggatgaatttaaaatcgcctctatgacaaatacaacgagtgaaattaatacggtgtgcattgtcaggaggcaaccctctaagtaacgacctcaagactgaaggtaccacttagctttctggggcagccttcaatctagaatcaatcctctggctaactatgtactaaggacacatttgtgtatttggacctagcaggtcacagtgcagacaagtgtacatagttaggaagggacttatgtgctcagacaataccgggacatatggaggttttaggtctgctggattcaaagttacaactggaaaagtctcatgagatggggagtgaaaagaaaatgtactcagttgctaatcttcctggttctgagtttgtgttcagcaaacactctgcagactcaaatgaacattaaacactgttttgggtaccatgaatgatgctctcatgctctctctctctctctctctctttctctctctctctctctctctctctctctgtgtgtgtgtgtgtgtgtgtgtgtgtgtgaagcacctgagaagtttccagtgtcagaaagaattttacatttgtctatatttaaatagagaggatgggccaaacttgatctcttatttattatccagagaattcatcaacatttcttcagagcttataaagatacatggagatctaggttagaatctgaaacatttctgattgtcagtgttttgttttaaaggctagcccatgggagagaggatgggagccacaggacggcacaaggcaggtgtgaactaattggtagcaggtgtcaagcattagaggcactagtgtagcttttctgctcaccacagggcctggcatccagccacaggcaagctttgaatacctagatcgtggcttgcacagatcacaggttccatggccctgtacttttctagagggaacactggagctgtgtgcgacaatgacctctcatcagatggagctacttacacagcttgattcctgaaatctttaggtgtcacctccaaccaagaagtcttagcagatgattactagcctaaacactgtagcagacaatgtccaggttaaacactacccaggcaaacacaggaaaaaccacattgttcagtgagttttgtaggtgagtggtgagaccagggaacaaatcaccaggacatcacctggtacagacggggaccccagcagtaggtagactctgcaatgacaagaatggcgtctaacacccaatcaggagagctgagaaagcagtgggccacatggagttgtagaacattaatgtcagacactgactgagcttttaaaaatagagatgtctagtctatcatcccctatctatcctaatgtcagaagcagcagaggaccatacagtccaaaatgaaaaaacaaaaacaaaaaccaaaagcaaaagcaaacacacaagaaggtgtagcacccacttggaaatcttctgaccctgttaacactgagcttatataccctgttgcccatttgtggctgacgtattcaaaggatcagagtttaaatagcaagtgtcctctcacccgtcttatacatcgctgtggcttccacagagggaaagaaggaagtgtgcctcatcctatgcccatgagagtgaaagtgttcttgaaatttctcttgtaagaaaaaaaatctctgttcttagtaggatgaagtggaaataaagtaagacaacagaaagacaaatggaattaccttacagaaaaaaggattactgattaaatgcaaataaattgaacaaggttactaagcaacacaaataccatgtacatgtgtaatttttatgatttttaaaaagtcacgaactacaaataagcaaagtgctaacaataatttgtctagaaatgacttctagggggactcaggaaatcatttgaccaaaatccactcctgcgggtcaacaaaaacatttatttttggttcggaaagctcaacctgtctaacttttgtttgggtatcaataaagtgccatttgaccaaggagaaagatgaacatgccagctgaaactactgctacttctccaagattccagaaaccaggcactggaagcccctctttgaagggtgaggatttgcaaaccaaagtgtgaatgtggggacacagcattcatgatctgcatgggtgaggtgtgccttttctctccctatgtctcccagagtgcacaagtccctagaagagcattcccttccatgctaagaagagaatttttatatatttatgtgttccatgtgtctttttgagtcacctagacatgtaggaactgtagaaacagaagacagtgtcagaacctctagttcagtagttacaggtggctctaagttgctgtgtgggtgctgggaaccaaaccaaggtcctctgcaagagtagcgagtgctctttaccactgagccatctctccagacccagcaggtaaatttttatggactatatgcgttttaactctttaaggccatagtcatacagccttgctacttcaatacagtccactgaccatcatcattaccaggataggaacgatcaatctggggcccaatctgggtgtttcttgtgtattcacatgctaagtggactaaaaatacccattacttcttgaattagtgcttctttccctagaagctagaagttaggctaatgctaagataatctgaacattaaaataaatgacattagggcataacacactaaacataattcatgaattcatatttatatcaagcaaacaagatgggacagaagaggttcttatttatgaaaacttctctgaggagtgaaggatcacaaaagtcgccattttgcaccaacgttactgcttcaggcaacaatttcctgggatcataaacaaacaggtaaaagacgttgggacatggggtattcacatagttttacaatatttgtccatgcaaatgctacggttctacaaaacaaaatcttacagtgtaaaattgtgagttacaaagtacttactagtattgtgtactaatgaggaaatgtggaaaacattacttaaaaccaagggctcaaagttaccaccactagtgaggctacactctgatatcacacatctcacagctgctaagctgatgatgcgtttacaaggacacatggatgtctatgtaacatttctgcccaaagtgcatcttaattccaataatggggcaaggtaaagcaagcccccagaagggccacttaatgaaaaaaaaatagcacagtctttagaaaaatatacattataaagattaaagaaacatgataactaaatgtaatgtgtgattctgggtgggctcacagactaggactccaactgttggtgctctgattacaaaggatgggcataacttagaaggatgtacacatcaggctgtactgtatccatgttacggtccctgaacttagcaataaatctccttcttgggtgataaaattgaagaatttagaagaactgtacttgtaaagaactgtgaggattatattaagatatccagaacagagaggcagagtggagtggtggcctgagaacacgtagcaaattcagtgggaagcatgggtcgttccttatttgtgacttttccatggactctgaatttgtcaaaataaaacttggaagaaaagtgagatattaaacaccaacagggtgacaaatggcctctgtccccagaaccttctagtagaagaatctgaccactaactggatctcgctctgcactgaagcgatcttgtggctggtttattagagataaacggcaggctggaatgatccctcctgcagagactgttcgtaaggggaaagctctttccagtcaaaagccctccttagtcaatacgcctcctaatctggtgttcagtgtgctaggccgtgccctcagcacaggaaacacggcggagaatcagattccttgatgggcagaatttacagtctgatggaagaagacagaaaataaggaatgcaagtcaggcagcaatagtgctacaaaggaggataaagttgagggaggggaagtttggggaagtggtattttaaaagggctcccttcagcagcatacatgctaacactagaacgacacagagaagaagacatggcccctgtgcaagaatggcccaaaaatctgcagtgttcccctacatttttttttaaaggggaggggttagaggactctagtcagatcacacttagacaagacatgagcatgttcaggctctcactgagcagatggatagtggtgggaagtacaacagcagagaaaatcctgagccaagggctgaaggtgaaggcttccagatgaaacagtcaggggtaaggtcacacagccactcctaggtcactgctgagacactgtcatttattctgacaactatattgcttcctcccaccttccccggctactcagcggcctattgctctggacagctggcacagtactgtcctaaggaagggcctggccttctttgctcccctcagttagtgagactctatggagggtttccctccccacctatcagtcacctcaggagacgccttcctcctggtacattctctgacacttttgaaatcctcaaccccgaaagtttctcttgggagttctgtttgctctgaaagtgtctagtcaagggtggtttgtttgcgtgtatttacaacctccagggtttctttccacagaagccactctccttccggggtgctccgtatcattctccttcaatccagcttacttttcttctccatctgaactcggctctgcaggcaaacagtgtcctgttcagtctgcggtgatgatcactcaaggagccagaccctagcaattctttggtatcagtggggctgttgtttacatcagggattaagaagtcaaccttttaataatctgacaggagttgctgaagtgctggctcagcatgccttccagttgctgttagccttaagcacaccactagggttcgggtacaacccagggcatggtgcgggccagggagcacagcgcgcctcaagccttggataccgatcatgatacaggaaaccatacatcagataggtgtgtgcacagccagagaaagtccaccaacagcagtttacagcattatttctataggaagaacaaattctgagcttggctcaagtaattaacttactgatgaatttcggcatacagccttgtcacttgtaatactagcatctgtgactggggctatattttgtgcacagattatttgtgacacattgagacttgcagggctgatgtggggaggggtggtgtagatttgctttgtttttgttggactaaatgtacttcagatttaaactgtcaggtagtgagacaatcatcagcatttcccttgcataatatgtgcgctcaccaagggatggtctggagaaccaaagaagggttctgcggacagatcagtgagtctagtgagggcagaagggggatttgacactttaaaagcaacagcttgtgtatctctgatctcactggacatcgagggctctgatcaccagcctgcactgcacagaatttagcttacccacaaaaattgttgtttgtgcaacagttacatatttactagatagttcacagctcttctaacattttgtggaaaagttcgaacctgaacatcaaggaaaactatcaacactgtatatagataacagtaatcattacattccctgaacttgctgacgtatacactatccgctccagggaggacaccgaggcagttaaagcagtaaggaatttgagggagcaagaagcagtgaaccagtaatgggggattcaattctgtatcactcatttcaattctctgggctatccccgttcgcatgtctaggttctcatgcctgtcatctagactgcagagaaccaacagcacccgggtaaatacctccaccatttacttcacatataattgctccctgtttggataattttcaagcagggcaatttttttcaaaagcaccgtaaagaatggaagtgtttgctacagttgaccaatgggagacttatatactctgtctttaggatgctgaaagtgtggcaaagccctggaccaaccagtgtggccaaaccctggaccaatcagtgtggccaaaccctggaccaatcaggttcagcatttgcagcattcaaaaatcatctattacgaagttctaaaaccattccttgttttgtgacccctgtaagtggtgagttattccacaactcctcagaggactacctaccatctaccaggaactctatgagatgcctggagcacagcactgaatatataaacaggcccctgtactcaaggagcttttgtctaagaagaattaagtacttaaatttagtatctgctaaataaatactaagagaatgtaaattagtcactggaacacaaagttccattttcttgttttaaaagaaagttgtcgttgttattattattattattattattattattgcgtatgcatgcaggtatgcagaccatgacacatgtatgggagttaaaggacaactttcactaggcagtagtggcacactcctttagtcccagaatttgggaggatctctatgagtttgaggtcagcctggtctacaaagtgagttccaaaacagtcagagctgctacacagaaaaaccctgtcttaaagaacaaaaacaaaatcaaaacagaacaaaagggcaatcttcagttgattttctccttctatcatggctcctgggggccaaactcagattgtagggcccacatagcaagtgtctgtcttcacctctattctgccagtcctggagtccaagcttctaacaaaagatgagacaccaagttttctttttaaaacaaaagccttaagcctgaatagtctgagctaccttaaagtgggcaaattcaatgtcacccagtgtcagaaccaatttgtggtaatcttacagcctaccctcctactgcaagtcttgttgggatagacagagtagagtgggcagctagcttgatggctgtgtacccataattccttcagtccagagagaaaggcaggggaatctcaagttcaaggcctgtctggactacatggttagtctatattgccaaaaaaaaaaaaaaaaaaaaaaggagagaagatttgcaaattaaacatttcacttatgagtgtaaaattatcttttttaaagcaagtaactattcaaaaccatgtactctaaagttttatcatgtaatgcctcatgtattataattgtggttactcaaactcaagtattttttataatttggtggtacggtgttccacaagctcaacagcaaatgacaactgtttggttcaaccctatgaaagctccctgacagtgttacattggcttacactgacggaacactaaatccaatgttgtgcaccttactgaagtcattagcttcacaactacaacccagagctatcaggttaaaactttaactcatgtacatatttcttttgtgcacagagtacctacagtctgagaatgtgagacccaccaggtctatattcaaaattaaacgaagcaaacggaactgtttgaggatacagaagacagaaagataatttatattaacaagtagtcaatatgccagtatgtatttttcaggagatctaaaatacgatttttatacaaatatatattgactacatgctaaaaatttacttaattcactaataaggaaaacatcacatgatgcacttgtgtcagtgaagtgcaggagaggctgaatagccaccaaaagccataataatgaaataagatttctagtgtacggacctggagggatggctcagaggttaagtgcacttcttgctgttcttgcagacgatcggagttcagttcccagcactcatgtctggcagcctgtaactccagctccagtagctctgatgccttcttctggataccatatatgtgcatgtatatacaacacacacacacacacacacacacacacacacacacacacacacacacacacacaccacacaccacacacgtctttttttttttaatgtggcttaatgttgatgtcccactggacaattgagactataactttatcagggtgtgttagcctttcctctgaactgaaacattctctccagaaagtgggagggctgagctcatgagagccaagaacaaactaacttcttcatttccaaagttcacaggggaccttcccagagctatagaagcagaaaccaacagttgggggagaaggctgttccctgctggttgtgcacagagctcggggatgtggcttttgtcagtagccaccctttgggtgggtagattattttcttcggtaatgcagctgttctgggtcgtccctgctttataagtaaccccactaaaactcactgtccactaagttggactctggtgcagcttgtactttgttctgttacaggttcctttatggggtagctagtcatctgtgtgtcctctctccccaggaaaagtctctcccacaaaagaacatcacctctgtcacacagaagtcctttgtagctcaccaattacacataaaaacagggttctacttaatagtcaatagtaacttagacaaaagtatacttaatttaggaatatgtccaagcccatgtaactgttccagggtaacacagaaaggacaggtatttatttcatgctcccatctcactcccactgcacacccgccccctcaaggtttggattgttttctcaaagattttaaatgttcagtgcaatcctggctgcttcaaactctcccataagggactaatctagacagcagcgtgctctagagcagttcatctcaaccttcctaatgctgaaaccctttaacacagttcctcatgttgtggtgatctgaccataaaattattttcattgctactgctatgaattgtaacgtaattatctgtgttttccaacggttttagttgatgcctgtgaagggtttgcaatcaacaggctgaggactgctgctctggcgacttcaattaccctgtaaaaccatccagaggtgaacattcacctgcccccaagaaggctgtaaaagtccttaaatttttttttgttttctttcttgctttttgccacatatgtggcttctagttggctacaacagaaaacccgctgcttgccctgcttctagtcatttctaccaatgcatgtccttgctgcttcccttctcttggtaaaatccccctgtatgaacactacgcaggtaaatctttccagcaaagcatgatccttcaacataaaaacatatgcaaattcacaccacagtattataacaagcattgtgttattaacacatacatgttaatacttctatccatctactcttgtaccagaatcaagcaccttactccttaagatcagtaggttaacaacctccattcaccaaatccaattacagaacaaaacaaaaaatcgtctcaaccgcttttaggagcaaaaaatgatcaactccggactctgtactatacattaaatcaagactcttaattagcaagaaagatggatgccagacaaggaccactcactgtttgccaaatcggtgccaacctgggttttacaaaaactgtatcctttttaatcttcacagaaatcctatgaactagttagtattttagcccctcttttctggatgaaataaactcaagtatcacagaactcactctcccaaggtcacaacattggtgggactcatactcagattactgacagcctcagagcttatatgcttaagcactacgctatgtgactggagatgatggaaaaatcatataaaatggatccatctctcccgcctcctacccctccaccacatcatcaccaccaccaccaccatcaccctcacatttacttagcattcttacacaaaccattgttctgaacataggaagattttaaatttttactacaacctgttgagtaagtatgactactattcagtttgtaggaaaaaaaaaaaaaactgagacagaggtcaagtgcctgctgaggtcagagtactaacgagatgcgggtgggttgggatgtagtctagatagcctggtccccatgggccagaccccctccacacacatacacccctaccccgccccccaatccaatgttcacagtgatcctgagagcacagggcagtggggcatgtctactcttcagggcctctgaggctggaaagcgccacactgaagtacagaactctaatagaatgtcatttagtataaccaaaaatcatcaggttacaaggttttcattcagcctcgttaagaaggcaaaaaaggtaacacacttaagcagtttcatccaaggtaactcttaaggtcgttgttgcccccactcccccggaaaacttactcaattcagaacaaacgagctgttatagtggcttcttacaaatccttctatagaaattggttttgttcgtgcaacattggggtttctcagaattccctcgggggctgtgggtagctggaggaggaggttcccgactccatgttcaaataagtggctccgttaatgtgttttacatactgggcttcccctggcggttttgctatgagagttctgttctaagtgggcaagccttcttagctgcaatgtcttctccggccttagcatttctccttttgattcctgcatgccatgtttaccaagctctggccattctctcacctgaccgtccctttccattccctcctgtcaatcataatcagcatcactgctaatgcttattacatggcaagctctagttacacgtttttatatcagttgtattgtagagtgctctaaataccccatgaattgaatcctatcatattgataccattttttcagagcaggaaaccgaggcttgatttgcctactgcccaatgttcactaggtaggatgaaaatacagtcatccctctccaaaagctgccagttgcttacctgcggccaattccaccctttacccacttcaatactgctccagtttccagtgggactttgttcaagactcagtctgttcaaaacagaaggcacacaggaagtacctttctttctggaacagcttttccagcaagacctggacaccagtgagtgctgtggtggctggtcacagcgcagtagcatcggccctgtggctgttggtcagtcttgcagtgttagattgcttctcagaaagaggctatgctccctgatctaggcacagggcaggctggtttagtcttggcagatagtcagtgtatctagttttgggcaatccccctgaaacaggtacagtcactgccccctcctcagtttcctcacggctcacctggaagtagctctctggctctgggagcaggctaggctaccctgagaaagtaaccttgaacaaagattgtgcgagcaccactctggtaaacacagcactgcagctgtattgactggactcctctgcagattgacagacaatgcagggagttaatggccccaggacacagtctcaggcaggggcaggtgggcagttgatcagcaatgtcccagtttcctttccatgtgagtgaggtaactttggagagtggacactgctctcttgagttgcctgcagggcctgggttcccaaggtccacagtagagtccttctagagctcatccttcttaggtgacttttctctcgtgatcccacttctacatttgcctggtaatattttgggggttgcttctcaagtacttgtgagtggaggggatctgcgctgtggaaagccacactaaggtttcctttcccttcttattgtctcatttctccatttgccagacaggagggctccataaacatctctaaggcttcatcagtgacatctacaaaggttcagtagtaaactaaaactgactacaaagtttatttatttttctaaaaaaacccattttttacttttattttttatgtatgagtgttttgtctgatgggtacccagtggcctaggaagccagaatagggtatagaattccctggacctggagttaaagatcactgtaagccaccatatgggtactgggaactaaacctggatcccatggaagggcagtaagaggttctaaccactgaaccatctccccagccctaggggtcactacttagtgaaaatcctgcattaaatcttagagactaggccaagtctcacctacagtaacatggaaggttcttgggcatcattggggaccgacaggggggctttcatggtaactctcctgagtgcttcatggctctgcagggatggactttgtctgggttactttctcaaggtgaccaacatgcaaagactgagggggctggtataaaggcctggctaccacagccaaatcaagagagttctgaagagctattccagccccacacttccactgaggctggaatagcagcttaatttgcttaatttcttctttgcaccccccactctctatgagtgaatgagagcgtgtgtgtgtgtgtgtgtgtgtgtgtgtgtgtgtgtatggggggagggagggagggaggaagagagagggagggaggcaggaagatgggagggagacagacagagagaggggggtggttatatgtagcataagtacatgtctatacatatacagaggccagaggagggcattggatatccctttctattggtttctgccttactcaaagatatcctctgagacaggccgaatcactgaatttggagctaggccagcagccatcaagcctcagtgatcctgttgtctctaccccccctccacaggaatggggttacagacacacacacacacacacacacacacacacacacacacacacacacacacttacttttttcacgggtcctgagacccgaactcagctcttcatgctaatacaacaagtagcctccactcactgagatattttccggcccctccttcccatctcttatacaaagaacaccaccttgagtcttcgagaatcaaacctgtgacaagcaaactttaaattttgcttattaatgtctcccaaactggaccatgtggaactttactggtggaggcagagctgtcctttcttgatgttctggaagcatgaattgagtgacagaaggggagaggggcagtgcttttaacagaatggaatgaggtagatacaaacctgttaggtatgagatgcagtttcagtttctgaacaaaacaagaaagacacaaaaggtcagaacagccagtgaaactgaaagctgagcacacagctgaggcagccagagctgatgatgtaagagaagcatctgaggagggctagaatgggctccctggcagggggacagactggatatacacggccaagactcttggagtagaatcaccgtgatctgaagcagggcccctgacttcaagaaactccatccaatccacagagtgtgggccacatggggagaggccaaatgtcaggtggaaattcccagttaagtgcagggttgaattggttccactggagagtccagggggatccccagggtgctgtcactaggcaggactttacagagaacctgcccaacagctgaaggcacagaggggcctgggtccccagcaatggtcagatttgctttgtggagggaaagctggtgacacagctatgctcatggctgggtctaactgctgggatccaccacctcctctgctgcactgcggccaagagattcaaggtgtggagggtggtagcaaagtgattgacagttaagatgattaatccaggcagagtccaaaaggaggtgagggggttagttttatgtgaaggagggtggctacacaaagactaaaggaagtaccaagaacaaggacaatgcgggcgcccgaggtctttgaagtaagaagaccagaggggctgactcatatagggccttctggctcctacttgaagacgaatgaaccgtgaggacataattgggtagaatgacataacctgacactccaatttccctcagttactgttgaagtataaaatgcaccccccccacacacacaccaggctcacacatttgaacacttgctccacggctggtagtgctgtgttggaaagtggtggaaccatctgaagcctagctggaggaaaggggtcacatggggtgggacctgaggttacagcacccccctttggagctgtctcttcctgactgctgccaccatgtaacctgtcactgtgtactcctctgccacagctgagtcgcccccgtcaccatgccgtccccgccaggatgtactgtgtccctgaaccgtgagccacaacacgctccccccccccaccagtgattctatcacagcgacgagaaaagcgagtaacaagccctctacagggtctatttttcacataatattcctcacaacctgaccagttcaacacgctatgagttcactctctcaacctctaaggatgcaggctttgtgagaggagggaggcgctgtctgtccgctgggccctgctggtggagtaattctcccagtttcacttacagtgtataattaacacagtgaatcaacacaccatcttggaaaaaacctgggttcccttcatgaatggcagcgtgaacccagacaaaggcacacaggtgtgtgtgtctaacctactaccgagaggaaaaaacaacagatatatgtctttgggggaaattaggcgaggtctcccaaaacaaattatgtttctcttttgtaaagactgatggcaagtttcagggggaaaaacacagacccagcggccatttgggagggttcaaatgtatgaaattcattcactaatcacatgctcaataagactatccaagaaaggctgtgacaatgagaccgaagcaggacagtactttttttggaggggggtggtatcctgctcaaggcagaaagggggctgtgggaaggaccaaaggtacacttcctctcccatcagcactagggtttccactgacccaggcaagtctcacgtactgcctctgcttgtaaacaatgtttcaaatttacaactaaaaccaaatgagagatctgcctgcctttgccttccgagtgctgggattaaaggtgtgtgctacaatggttgatgcctggtttaaaaaaataatcagtttgggtgtcttttcatatttaagtttctagatcaattctttggctcaaattagaacaaaagtgatttatattttcaatggaaaaataggagcaggaaaatattattgaaatgtaattgaataaaatgaagtgtttttgtttttgatcctgtaaggaagggaagggggggtgagctttactgggggtcggtggctgcccagaacgagctggcagaggtaccagtgaagctgcggttctttcttgctggaagcaaggctcccactgactctccaccattggtccttttatcccaaaattcagaagtccattgtgggcttaaaaccatcatttatcctcactgactctctatcccctcattgtaaaaagcaggctaccttataaatcacacctgctaggggttaaataatgtaacacagatgtaacaatgcttggacagtggcatgcttgttgtgacgctgacactgcctgtggagatctcactttctgcagctagacctcgctcggtgcagacaaccctggaaagtaacgtgccatagagaggtcacgcagacaggcaggaacatgcctgaagaacccgggtatcttagatcaggcaccagaaccatcaacaagctggtagatgactccggccctgagctgttgagcccaccctgtgaataccgtgtggaacagggccaggccacacagtcaaattccagactcaagaaatgtgggagataacaaatgattaccattttttgaagtcattaagctctgggctgatttgatacacagcatcagataaccagaacactgtggtcaatccagtcccttatccagtccttacctagaaattccttcatgctattagcctatctgacgaaaagataggtgtgccgcctcatcttgcacagggaaccaagaacctggaggctccagggaggagccatagcttgtcttgcaacagggtcccattgcctcgcctcagtggtccttagcctttaagtgacttcatgtgctggcacaaaaccagaccatttgggcaccaggcacacatgtggtgaacagacaaatatcaaggtaagacattcaaaacaccttaaaaaataaatctttcaaaatttaatgcagaactggttatggtttgttcaaattctagcagaacttttgctgtttttgttttgtcaattagtgcattctatactgggcactatttactccctcaaatctcttggcacactttttcagtccagtctttgtcagtatttcattttagctttatgctcttcttacactgtccactctggccttacccaaccatgaccacatggaataaccaccatatggaatactagaagaagcccactgagtcattctgacacatgcacagtctcgaaatagacttaagacaccatatgcagcacctggccagcagcgaattgttgcagagcaaaagatgtggagagcctctccgtcctgtctctacacatggtcctggagatctccttcagccaagacttccaatgctacctctgtgccttcaaactcctgcctctctctttttacagattcttatatccagctgtttgctctgtggattttctttgcctactgtcataaattacccaagttaaagtttattattttatagttttatggtcaggtaggtgttggcagtcttgaggatatagaggagaccaggcttcggtgccatgtctatttgttagaggccacacacactctcccaggcccatgtcttcctccatcttcagtcagcaacggtgcttctggtcatttatccacagttgcacagcttctgaccaccgtgcaaaagttctcagcttttagggactagtgtaaataggtgagtccacctagacaacttgccatctcaaggttaaccccttctgacctcatttctcactcaagcccttgttttctgcattctagctagtcacagtggccaccctgcagcccctcaggtatactacctgggaacttggttcttgttttctctcttgcctggggctctcctggccaactccctaaccctgtgggtgttcaattacgtcaaatctctacagaaagaggagcctcaaagaataccacttattatgtcagttctgtaggtcacaaacctggttgttgcatcggctaagtctttcacttagattctcaagtggaacctttctgaagtcccactgagcatctttgggttgcttctggtttggggctggattcagtctctgttgggtctctggggccagtgagtggaaaactgatctatttcttcaaggctcttctctgtccttcttatgcttccccatgggcccctttatgctgatttgcaatcaaaccatgccaagttctggacacttccataaactaaccaatgcgatttttctattttaagggacatctcctattttaagatatttaactttgagtgcacctagaaaatctgtttagcctgggaatttagcctattcataggtgcttaagactacaaccaagctctctgttgcccatttcccctgggttcttccttttctgctccagttttcatattccatagctcttactcccttgtgaaaaacatgataatactcatgcttactgaaaatcctgattcctaatagtagagaaatcaactctgtaaggttaagaatgtctgttgtacatgacaacatgccataggcaacctagcagacaactcaatacacatttcttcaaggagtaagtggccctattgcagactattttctagtccatttctacagggtttgggggctgtcaatcttctttttggtttaacagcttggaagcactcagtaggatattctgcactgatggcaggaaggtaggtaaatggcaaactttttctttagtttctgctgtcaatagcatccaattggcttgattctctttgataaagatgttcaaaaatgcctgcaagggggaatgtgtttaattataatttccataaaaataagaacggtttcctttttagaccattttccaagtataaaagcaaaacaaactgagttggtgagttaactcatctcaacgtggctagaaaataaatggactaattagtaataaatgctttctaaaaatctccacaaacaaacaaacaaaaaacaaacaaacaaaaaattgaaccataccgatttaaagaaaagtcatgagaagcaaggggaagctgattaaatgtaaagcacagattgtccccagtaagcttagatgaagctaggaggaatggaagaacagaggagagaacagggggagacagacatgagatgaacataagtaggcttagaaccaaatgcattttagaaataagacccaaactttacagaacagggaactaaaactcagagagggtgagcaaccctctcatctcccacagctggtcagtatacaacacttccaataaacgtgctactgtagaataaaacagtgaaaaaaaaataaaatctcccctccttgttttgttgttgccattagttttgtgttgttttgttttgtcacagggtctcatgcagcccaggctgcctctaaggctggcctacaactctggaccctcccgtctccacccccccaagtgataggaggggcactgccacagctggctttcctgctatctccttgagcaacgttcatctaatgatctaagtctctatgttagaggccttgatcgtctggaatgtacgtcagcacacagtgagacactcctgtctcgtgcttgtcccgactaggtaaggatgctcatgtgaggagcagtgttcttgacagggcacagtccctaaggagcatggccacaagtcttgcagcaccacagtggctattggagggcacaaggacaaaatggatgagaccacacttcaggaaaccaggagggtcaaatgtggtactgtctaagtagattacctagacgctgatggagaaaaatgaccaccaatgaaaggatcttgacaaaaatctgtatttatagacacaaacctgctgcctgtagaaaggcaaaaatgaaggaaatcatattttaggagaataaatcatatatatttttaatgagattctcacataaacacaaaggcagcaggaacggatgtgaaatagtttctaaatttatgaaatcatcacccattgctttctgaatacctgcaacagggaagaaaaacagcgcaataatgcagatctctatttaatacagaggtgagactcatttgtttggtatttctcaatgctcttccattcactattgagcagctggcattttctttttttaaaaaaaatcaagaggttggtttattaaggggatatacacagagtgacttagtcaatggaaagcattgctgctagagagaaggagaaaattatgtattttcagattcaccggtcatctagcctcaccatggttacaggctgtgcttcctaactttcccaaatcacacttgagtcaaaatgaccttggtggtaatttgaaccaaatcccctatctcgtacacagagaaactaaagcttaaaaaggacgagcaccctaagtctcctcactcccctggactgatgtggaatcattacactttatgacttcaatgtctgcaacctacaaacccatacgatgaaaccctaacctccaaggtgaccctattaaggtgaggccttctgaaggcattacatcatgagagtacagctggaactcatgcctttaccaaacagtcctagaccaactccattctgccatgcaagggcacagccaagaaagtacaagtggaaaaaccagacgctcctcccccctccccaccacacatcaatctgctcatgtcttgaccttgggcttccccaccactggaactgtgaagaataaactttccttgtttgttaagccacctagcttttggcattttgttacaacagcctgaataagatagggcatcactgcagaaaaaaaatggcagacgttaatttctgtttggcttttatttgtaaactatataaaactgtttcagaggttaaaatttccatggcttttcacatgattgaaaaaaataaactctcaaactattttttatagttaaagttttagtgtaacttgagtatatgtgtgttccatattgacccatgtgattctggggcttcaacctgtttgcttttaaccaagcaggcttcatgaaacagagcagacaaaccatgcatattatgcaggcttctatgaagatttttttaaaagattatttatttatcatgtatacagtgcaggccagaagagggcaccagatcccactacagatggttgtgagctactatgtggttgctggcaattgaactcaggacctctggaagaacagtcagtgctcttaacccctgagccatctctccagcccccatgaagattttttttgttttctttgttcgatttttgtttttttttctgagacacagtttctctgtgtagccctgactgtcctgaaactcactctgtagaccagactggctttgaactcagagatctgcctgcctctacctcctgagtgttgggattaaatgtgtgtgccaccatcacctgaatttttctagcttattttaagataatatttttatctcgtatatttaatatttatgaatagtcttcgacagtttttacttttcccatttttaatatagataggtatatctacatctatgcatacgtaggtatcttttactatttggaaagagcacgttatgaatttatatttggtaggaaagacataataaaaattaaagcatgtaacttttagctatatatttctcagttataaaccgagattaaaagttcacaacttaaccactgctgaatgcacaacatggtagagaaaagcgtaatggccgagttgttgcacaaatgtacccatagtgggaaagaatggagggagatgaccaagtatcaggaggatgaagggaaataaggagaaaattgtcagtagcagtctccacaaaagaaaggtttttttgttttgttttcttcttgtgtgtgcttacttcggcagcacatgtactaacactggaacgatacagaaaagattggcatggcctctgggcaagcaacacacaaatctgtgaagcatttcataatttttttccagttcccttaaggaacttatggccgtatgttttgtctgatcaaagaataactctgctgttttaatctttggaagtatgaagccacaaacttgttaaatgtttcctaagcgccatcttctgtatgctgactgctggtgctcgtgggtcactcttggttgactagcgctggttattgtgcttattgatcctttttttcttaaagattacaagaattaaaactgaccaaaatttaggagaaaagattttttttattaatttactttttacattccaatcccagttccccctctctcctctctgttggctcctcccaccccctccaccttccacctacccctcagagagggtaaggcctcctctaggaagtctattaagtctatcttttcatctttttgaggcaggaccaaggcacctctccaccccctacacccctgtgtctagcctgagcaaggtatctctccatatggaatgggctccattaagtcagtttgtgcattagttttagatcttggacccactgccagtggcctcatatattgtgctagtcacaccattgtcacctatattaagagagtctagttgggtcttacgcaggttccctatttgtcagacctgagtcagtgatctctcacgctcaggtcagctgattctgtgggtttccccttcatggtcttgactcctttgtccatattattgctctgccctcacttcaattgtactccaggagcttggccattggttagttgtggatttccgcatctgcttccatctgtttctggaagagggttctagcttctctggggattgtagactgggtatcttttgctttatgtctggtatccacttatgagtgagtacatactatatttgtctttctggttttgagttacctcactcaggatggtttttcctagttctgtccatttgcctgggaattttaggatgtcattgtttcttactgctgagtagtactccattgtgtaaatgtaccacattttctttatccattcttcagttgaggggcatctaggttgttagaagaattttcttttacctacttatgggacccttttcctgtggctgggttcccttatccagccttgacatgacagtatgtgcctggtcttatagtagcatattatgtcatgtttggttgatgtccctgagaggcctgttctttttgaggggtgacagagggagggtgaatctgaggagagttgaggtgggggtggagagactggggggaggagaagaaggtgaaactgctgtttcaggatgtgatatatgagggaagaataattaaaacaagaaaatgataatagtaatgataataataataattttggcaggaaaagataatgtgtttcacagggtggtcccagcatgcacaaaagcagtgaccagaaagggaatggctttgtcaggttctggcagaatgcaaggaatgtgaggattccttgccctgtacccataccacagaggccatatgctccctggtttcactttaaatccagttacgaggtcagtgggccggtaatgctgcccagtgaccacgcatgtcccttgtgtcacctaccatccttctgtccaattcaccctttcacctatctgttctcggctgagcctccaatatttcctccccgattctcaatctcagacaaggacccatctgggcaagtaacaagccatgagggcggagaaaatatagaccctagtcagaaggctcaaaatgacactcagggacttgggctttattctctgacaagaggtgggtatagataggtctccacatagatggacctttttctaagaggcagaagtgagggtgggtgaggaagttaatttggatttcaaatgagtgactgactgaaggaagtggcctcgacagagaccaagttatagcttatgactgtatagtgagaaggcagagaattccaactttttaaaaacatttatgtgtgcacgagagagagagaacaagagagtgtgtgcttatgtacacctgtgaatgcacacacaagcttgtgtgtgcatgtaccatggcacacatgtgctgaagtcagaagacagcacgagggagttggttctatcctatcatgggggttctgggaatccaacttaggtcatcatgcttacagtaagtaccttcacatgtggagccacattgctggccccaagaattccaacttattaacagcacaattatattcaattttaatccatgaactctgaagtgtattctaagaagttgtcattagcataatgttaatatggtcgtttcctgttttgctgagactgttctgtgataataatgaaacagttaacttttgaacccaggtctacggttttgagcaagctgaatcatcactgtcagaagcactggaagcttctgagaatggcaacagttcttccaccaggttcctaagtcattaagttcgggtagaagagcaagtaaatgaacagaaaatagtctaaaacttactaaaaattggcaaagggaacatgtaaatgctagaattctagcagtgtggaaatttcaccagtgcatgcatttatacacaaacacatagagatacagtaagaagtaaacatatagatgtttctaaagaaactcaaagcatccgaattgtgctcataatgcactgtctgctagatctctcctggtgcagggacacaaaggatgaagggtcttctgagctgagagataaccacattcacattcacctccttcctgtatcccaggacatctctaggagaggaccatttttctttctgggtgtgtcccttgacagcaacactcagctcatctccagggacctgctaactaagaacaatctcttcttcacagatacatccacaaagttgactgtactcacatcttagaaggtcacctaaggtacctcctgggttgctacagtgtccacacaggaagatttttagccgtgagtcacagcaaaagcgtgccgatctcgtggcagtggctcttaacactacttgcacacgggcatcaaatcagaggcatctgtaggtgactcatatctatcagtacagaggcatctgtaggtgactcatatctatcagtacgaacttcagggcctggccctcccccattcaatcacagtcactacaaataggtcccaggtgccagcctttttaaaaccctcagatggttctgatgtgaagcagaccctaaccagaccttgcttctagtgtagtctgccccccaaaaatgtaggcaggcgctggggcagactctcaacgccccctaggatgttatgccatcccagcaactggggtacacaatcaactgtgaaaagcactgtcccagacgtgtcttgtatcaagtgggccaactgtgagccttgtatgagaggaccagtctctcacctaaaggcagtgtttctcaaccggtgggttgaaagaccctttcacaggggtcatctaagaccatcgaaaaacacaggtatttacagtatgattcataacagtagcaaaattagttatgaagtagcaatgaaaataattttatggttgggggtcaccacaacatgaggaatgaataaaagggttgcagcattaggaaggttgagaagcactgcctgaagcctaagctggcctactcatattaaacacacacacacacacacacacacacacacacacacacacacacacacacacacacacacacccagcaagcagcctggactttccctgaacatagagtatcagaagcaagacctagtcctgctgggtcccatacacacctgactcatgaggtgactctttgccataatggaacggtggaaacatggagaaaagttttgtttgaatttttcactaaaattttctctgatgtacagaatatttatctcatctatacaataacatttttccacattttttttttttttttggtttttcgagacagggtttctctgtgtagctttggaacctatcctggcacttgctctggagaccaggctggcctcgaactcacagagatccgcctgcctctgcctcccaagtgctgggattgaaggcgtgcgccaccaatgcccggcccttttccacacttttaaaaaatcttttgagataaatattctctgtgtagccctggctgtcctggaactcactctgtgcaccagtctggctgcctctgcctcctatggactgggataaaaggcatgcaccaccactgcctgactttttccacaatttctttagtcaacagtccaatgcagcaagctatctaatcttgaaaaaccatagttcttaggaccctttcttgaatatttttcatctttcttagaattcctttggtgaaactaattagctatgcaaacttcgggtgatgccaaccacagttaggattgctgttcttggtgagttcctggcagaccttagctgggagaagtcagacacaaaccacagagacaaagctgaagggcaacttgagggtgcagctgagggagcccaaagaggcagcaccaaaggtgaagacctgaaaaaaaacacagtaagggcagatttacttgaatttgagccctaaaatttctccacagagaatctgagaaagttaagcagcagcttttgaaaaaaaaaatgaccaccagcttctgacagcatactcaaagtgagaacagtatgagagagttctggaaagcaaggatgtttaaacgccacttggatagaggagttagcccttactgcaaaggagaagttggaagcttttttaaaacaactggttctcggggtctgcccaaagccaaacacatcagagtttggtgctggggaagtcatttgaaatttgtaaaagctcaccccaacagttcttagacggaatgagcagtgctggaatcagggctgtggcagagagagttctaacttcaaagcaaatgtgtgcctcatcttttaatatacacatttctagagctttggacccaggtcaatctacaatcccttttcaccgctgcattaccttttccttactggctttagtttttactatactactccacagaaatgaagaaattcaaagtgtgctatcaggtttaaaatgaaagacagcagcatcctgccccccccccccaattctcacccaatcccaaacttcaactctttttataatatacctaaacaatatgtattctctaaaatttattgacatactaattctagacctttattaatatattttcagatgccccattatatgctagcttgtcccctcctggtcatctataatattcaatcctttctggagtcaagtatggccagggacagtatgtggttcatgtattttaacatagttgcaccaattgttactacaatacttccataactgctgatggtagctggtgttttgacctccaacccaccattccccacaattcagcaaagaaagggttaacatctgctacagtagggacagccttcaaaacctgcctttactctacagcaggtccctgttccaacttgtcgatggcctggctaccagttggttgttaaaaattctgaatattgcctgtaggtatgaccacgtaatcattcttgctatttgaatataagtgaaagtgatgcactgcactttcaaacatgttcttgctcttataatctagaacacaaacactgactgagcagctttcaactctacagatgagggcaagccttcacagacagtaggggaatggggcggggagcagggatgagtgactatgcaaaaggcttgctcaccctaaactggaacacggaataaaaagtcactaacttctactaattactcctactaacttctacattacaacttagggagtttttattatattacagctatggagactttttgtaagttttctaaaattaaacttcttttagtttttttttttttttttttgagataaggtctcactatgtagccttggctatcctggaactccctatgtagaccaggctagccttgaattcagagatccaagttcctcctacctcttcctgagtgctgcgattaaaggcatgcaccacttctcccaggcaccacaagtcttacttttaactagctcagcagtgatttgcaccatttgtgaataccacgtgctgagcgttttcacttttcttgtaaggcaacttataattgccttccactcatctcatttaacagtttttcttaattgacaagctattggaaatagcaagccaatttgaagggcattttatactgggtcaaaagtgtcaggttgcccaacagttttgtttttacttggaaattcacgtttcttccccaaagccagcttgctgcctctctaacctggcagcttccctctagggctgctagactgttttcttaattgtcattctagagttttctttggtcttttgccctgtttagttacatgtttctggagtactgtatattattcttccttggtttattcccacatttttttttatttaaaaataccacccaatagcttttagtgaaaagatgcagagaataatttatttagacctttaatatgaagtagtaaaaaaagtcttatttttttctccacttgatacttttcatcttttatttttggttgaaaataatttccatctgaatttttaaggcagcaatccagggttcattactttatttattgagacaaagtttctctattatgtagctctggctgtcctaaaacccactacgtagaccaggctcacagcctgctcctgactgttcggattaaagtgtgcaagaatccagtgctggtgttaaattacctaatgtcattctgtttttaatcttctgcataggacctacttccactaaatgatttaatacatattcacccttttagtaaaggctaattttacagtgatatgatttgtacatcaggggtgtgtgtgtgtgtgtgtgtgtgtgtgtgtgtgtgtgtgtgtgtgactgtgttctcattgactcttgagataatcctgaaatgaatgtcttccagttctggaaagtattctcacattatttcttatgtaatttcctcccctttatctctctctacagtctctctagatgtattatgttcattgcataatactttaattctaatttttctgccctgtttttctttgtttttattttttttctggttcaagccaatgaattttttggtcagattaatgatttttttttgttgctattttatggtcaacttctatgattaacttcttattctctcattgttactttttcagtctccattcttaggggagaaagtttcttatctctccacagctttatataggttgatgagctttgctgtttatttccctatttttcctgtacttctgcctctctgtgattatttttcttaatttttgtatcctgtttaattacctgtctattcgagacccaaaatgtgggaactatatagggcctcgctgcttagtatgtagaatttcactaaatttctgtttttattactcattttacccttttctagatttttcccagtgattacaaagccagaacctttaatttatttccattctgcagagaaaaacaagtctagtcttaggatgtcgtctgggatagcagcaggtttgtaagtccctcaggctttcaacagtcctgcacctggacgcctctgtctgccccatggcctctgcttcccgagcctctccagattttagtgataaactggatgcttcttcccaatattcatcccaaccctcaggacacgtaggcgccagttttctcctggacactgagtcagaagtctggacttttgttccttatctcccaactgtttgcaggtgtctccctaccattgcctcctttcacgttcaccatcattgcatgatatgtgttaatactggatctgagtgcctcccgaattcccatgcatggagggcttggcgttattcagtggagtgggactattcagaagccgtgggagcttggggcatcgtgaaaaaagctgggcaactggtgtgtgcttttgggggtatattggaacaagagccctggttctttcactctgtgcttcctgcccaccaatcgaagggcttcataccaggctgtgttccccccggctcttccgacccaggcccagaggcagcacgactgattaaagatactgaaacctctgagatgatgagccaaaacgaacctttctttattgaagtttaaaaatctcaggtattttcccatggggacatcacattaacacagcatctcaggaagggctgccaggaaacatgatcagtgcaccaaattcccatatgaaggcttactaactcaatttcataggcaggggaactgccactgaagatgggcctttcttactcttttgacactctaggttttgctgaggccatctgagtagctgcccatttatcttactatttttcaagatgtggggaaagtcttgtctttattaatcacaaagacaaaattattcaagtcaatcataattcaggcgcagtggctcacaccggtaattccagctcctgggaaggcaaatataagggtggcggggctgcagcttcagcaaataagacttatttcataagttaacttaaacaagtaagttaaaaggagaattcttttctagatggcaggaaagacctttagtctgttaattcatcaatttactctcaaaatatgacttatggtactagattatttttcctttattgaaaaacagatttttttcatacaacatgttctgattatggttcccctcccccaactcctccaagatcctccctacacccccttaatctgaatccaaaacctttctgtctatccttagaaaactaagaggcatctcaagaataataatgaaataaaataagataaagcaaaagcaaacaaattagactaggacaaaacaaacagaagagttaaagaaaaagcacaagaaacacgtatagacacagagacacgcgtgtatatacacaggcatcccgcaaaaacacaaagctagaagctgtaatatatacgcaaaggacctgcaagtttacacacacacaaacatacacacacacacacacacacacacacacacacacacacacacacacacacgcacgcccctagctgggggtatgctgggacatgcctttaatcccagcactcaggaggcagatggcaggccaatttctgatttttagtatagcctagtttatagaatgagttgcagtacagccagtgctacacaaaaagatcctgtcttgagaaaacaatacataaatagatttttaaaaaattaaaaaaatatgtcctgacagagtacatgtggccccagatcataattaaaggtaatagtggcttttttgcaataaagctttttcatggaacccttcttgccacttcttgtctactttatgatgacctgaactgaaaggtacctgccaagtgttttccaagaagctgtcaatctgaaatcttggctggtttgcttctaaagacaggaaaggaaggaggatgagaacttaaaaaaaaaataaagataagcacaagggctgctctcacatccaggggattatagcctttttatgttcatctaatgaacacaaaattgcagacactaagcctgaagatttcaacctttaaggctaaaatccaagcactcgtcctaaacactaaattcacagctatatggacaaataaagttcaagaataactggagagtaaagcactaatgttacacctttggtctgacacaactcaaaaggaacattctccgacctgtcaaaacttaatacctgccttccgttcttactcacaactcccccaaagaacaagtaaacagaccaagcatctaacaggatagacatttccccatgtggaagaaattaaatgggtctagttcttgaggtggtaattatatggatgcttggcttttcacagtttgttaatatgtacatttacacttcaaacggtttctgtacatgtattacattttacaataaaaaaagtctcagaaagccaaaagaagaatacataaggcagaaatcacacttgtcaggaaatacccggcttcaatctcacgtagccagtctggcatggataaagaaggaaagttgccatgactaacttaaaaggctaaaccaatgtcttgccaaatttcaacagttgtctttgttcaaaatagctacttgaagaggatgatctgagaccaggttggtattgtatttcctatggtaacactgataccttgacatttgcgtaacactacttatttgcagagttttaacatcatatccggagaagatacagccaatgagactttctcccatgcaacgagtgaggaaactagaacacttaatagccagttagcagagtgggctgtgagtgtacttgggtttgagccccaggaatggggcaaaaggagacagcagcagagattacaaatagtggaagaatcaggagagagaggatgagaggatgtgagttggggcggggtggtatcatgaacacatgcatgcataagcccgataggggcttcttaaatgtttctcagagagagatttccacattcccaaagttctgagtccaaacacaagggtttcaaagctggtcttgacatctgtgagtttcctgagattcccacagaggaggagagttccattaagtgtggctgtggaaatgattacaaaggacccagccagctgatgtagtaatactgcattagaggctaaactctgcatgtaaggttcggacagtcactaacctcatacaaagaaactggtacctttttggcccaagagatttccaaataaggggtgccctcaatatactcctgcaatctctgtcttccacattgcatttctcctcatagagcaatttatttggtgtgtgacttccatgggtctggttcatgggtcccagatctcaaacagtgtagtttggggggatttttcttttaaaacaaagatattaagcgtggtacttagtgcatttttctttctacctgggaagtaaagacacttgggtaagattcttgctgtgaagcctcaagctttccatctaaaattaagagtagttgaggtagagcatggcaaagtcactctgagctctgcaccaggctatctattcaaatctggccttcactaggagagatttgtattttgtttcttcacattttttacatgctaacttgctgctggtgccctcatccagcctgcagcccagggactctcttccacagcactggtggagctgtgtgctgaggaagttttctaagattcagtcagcagacactttaattactttgccagcaattctagctagaattcagaaatcccaagatttatcagctccagctcagccctgcatgtctgggatcctctcacatttgtgcaaatcgtttaaaagtatttagaacttcctcatctcttaaatgacagaataactttgtcatctcttccctaccttttctcttttaatcctgtggactaaatactaaaatagactttaatgcatatattctctgcttgctggaacagatactctgatacataatcactgtgatactctggcctctcagttctcaaagactacctaatggctttctacttccaatggcttggtcccctctccatcctttagcttagcttcactttgagttcttatagtaactcacaatggatcgcagcataattagaagaacttggaaattcctcatgccgttccctctctacccctccagatcctccccttctcctcattctcgctgccattacaccacaagtactcctgtctcctctcccagccatccccactccattttcattgtccttcaccgagggcccatatggtgctggcagagacatacaagccatctctaccccgtgtcctgagcactgctggaggaagccatgaacacaggagtgatgtttcctccacaagtacagcaacttctctagctctccgtgcctttggatcttcagatgatgtaggcaaacagctttctaaacatttcccactctacctcagtttcacacctcactattaatttttcaacccattggcaaaagatgaccaatccatttcaaatgaagcccatcaacaaactactctaaaattcagaattcttctatgcctttctctaactttttaattgcacaggctatggctttagagaaatgtaatgatgtgtatccatcattatggcatgacagcctacttccctcaaaccctttatggtcttcctattcacccctccctgcacaccaaccctggtaagtggatattatctccacagtggttccttccttttgcaaaatgacatttaattggagctacataggcaaggaaggaaggaaggaaggaaggaaggaaggaaggaaggaaggaaggaaggaaggaatatatatatatatatatatatatatatatatatatatatatatatatttggtttttcaaaacagggtttctctgtggctttggagactgtcctggatctagcttttttagaccaggctggtctcgaactcaagagatcggggaatattttaataggtacaacttctaatatttttcttccatgaattatgcctttgccatcgtattaaaaaaaaaaaacagccaaaactaaagctatctgcatattctcctctgctattctctaacagttttatatgattaaattcatgtttatggcctgttctgagttgtcttttgttagttttcacatagagcccagttgtcccagcacttgctgaaaagccaattccccatcatgttgcccttgttccttgacagcgatcagctgattaaccgtgtgggacctcaggagccctcttcttggttctgctccactgatctgtgtgcttaacctcttgccaatgccacactgccttgatcactacatctttctataagtcttaacgtcaagtaacgccaaccatctagctccattcttcaatagtgtgcttgctttcctgtataaactctacaattaatttatcaatgttcataaaacaactaatggaatttcgatggagatcacattgaatttacaaatcaagttcagaaatcctgatgatattgagtctccctattcataaatgtgaatttctacttacattttccttgatttctttcaatactatcctctcatcacacagaccttacacctattttgtagactcagaactcaacatttcatttcttttggtgtgctaatggaaagaaactgtaatgtgtttgtgctgattagtactttatcactgagtaaggattaaccagggagacagaacttcagttaagaaaatccttccatcagagcgacctgtctgcatatcggtggggcaggttcttgatggatgattgatttgggagggcttaaccaactgtaggaggtacaacccctgggcagggggtcctgggttttgtaagaaaggtagctgagcaaaccatggagagcaagccagtaatcagtattcctccttggcctctgcattgattcctgcctccagattcctgctcaagttcctgcacagactccttcagtgatggagtgtgaccaccaagtgtaagatgaattaaacccttctttccccaaggagtttttggtcatgatgttgatcacagcaacagaaacctaaggacaatatccttaattgcaaatttcactgctagtatatagggaaataccatgtgttcgttggccttgcatgaactctgctgttattgtttattagttgcaggaagttttcttttgattctcatttctcatacagataactctaaatttcaacaacagctttatttcctcctttaaaaccaaatatatctttgaatttactcttttttgccttattgtcatgattatccagaaatagcttcatcataatcaagatggtcaaataatttaatactgaaataataatttactgaataatttattcctttagaatgaaaatggacacttgcaacattcaaacaaataaaaaggtaacttaaaaatttttaagaggggtgcgctagccatacagccaagcctggtaactgtaagtttgatcccccagaccccagtggtagaagaagagaactgactcctgtaggctgtcctttgaccccaatcacaggccatggcacacgctacctcaccccccaaaacacacacaaataaaattatatttaaaaaaattcagcctggtctacagagcgagttccaggacaggctccaaaacaatacagagaaaccctttctccaaaaacaaacaaaaaatattttttaaagaatgggcattatttgtccaaatagcatcccataattgaatcagtataacaagtatgggtagactgtcaatccagataggaggttacctttatctgctcctgtactttcagcctgagcgatgtctggagcttcattatatgaaggattaattaccttcatactcccccctccccatgagaagccactccacccacaaacacttgatcatcgtccttacagtctttgttttgtctgggacagtgttagggattggattcagggccttacacattacaagcaaacattctaacgaggcactaatcccaaagccatggtttgttttcagggaatcttcatccactgtctctccaatattctcaagaatttattcccagttttaccatcctctccttaacgacacccttcatatctttatctaattttaacaacattgtgcactggggattccataaaaattagcatatttaagtcctgacttataatcgcctccattcatttgacctatagtgatggactgcacaccgcctggagacgctttgccacgactcttcctgtgtgttttaatacctgccaacaccaccccaggctgtcattctgcttgtcttctcgtccccttcatccaactggccaacaagtggtgttgcattcccttgtatggcagctcactcacccacccaccccttgagtccagtttgcattgctgcttttatggaagttactgtaacagttccccatctgaagccacattgctcctcatggggactagccttaaaatgtaacttgtgaggacactgtcctgcacttagcatgtcctctattacaaacccaacagacttcttagccccacacatcagatgctttataatatggccctcatgtttccatgtatccccctttcccattaaactcgtctagctcctcaaccttcaactcaaccacatttcttccatttctggatatggtcacatattctttccttcaaatctcaacacaggtcagtccccggatctctgccagttctactcctactcctatgtaatttttaaggtcttgtgccaaatcccccaattcttcctggaattttctgtctagtaatagatttggttttgttcctaaaatcgccatgcgttttctttacaattctctgacagttccgtgtgtcacagtctttggttatctttcataccctctctatgtaacttgaaaggctctcatagcctctgattaacccatatacttcttacattgtctttcctatagcaaactaagagaatgttcaagttaatctacatagtgaatagattagaaatggagttaatttatcaatgttaaattcttatgaggcctagaaactaagcatttcttttgcagttcataacattatattgggatattggaatcactttagttaaaaatgcccaaatttaattggttccacaaaccagagttgggctagaccttaggggtcacttaaaacctctgtgtcagccccacagatgcataaatgtgcagttggcagcagtaaccatttattttatatatcttatttatttattatgtacttttgagaccaggattcatctagtacaggctggccttgaactcactatgtagtcaaagatgaccttgagttcctaatcctcctgcctcaactttccaagtcctggcattataggtgtgtatgccaccacaccagctttcagttatcacttattaagagccttgtattcaccaggtccttacacattactccaggctcaccaatccttccgtgtatgtgggcgtcagccccaccacacacacagtagagatgagagaggcggggctgaggttcaggcttttctactgaccactgctacagacattagacctactacatggcccaatttctgtctcctgctgtgtctccagatactaattatgccaactcagtggaaacacatactaaaaatttcaagacattttcattataaccagaaacattaaaattacactgtagctttatcactgtaaaacggtggagctatatcttatttgccggaaaacttctttcccagtttttactccgtaaatatattttcaatgggaaagccatttgtccaactgcattcagcaagtagttgttgaatttccttagaggtgatacatgggaaggtacaaatgtaggcatgattttactctccgagggttcgcaagcacgaggcagacaatgggttagtggtaggaacaattcctccccaccggttggactaacccaggggtgtccaacaacataaactccagatttctggttctaaccccagctctgaatcttgaacaaatcatttcactgtcttagtctcttcagagagggaccttggaaaaaggaagagtgtagcccagcaacttaagctctctagtagcgctaaactgccatgttctctgagttcagtcttgaagttacactttaatggaagggtgaccactcctatttagcagtggactgtggaaaaactgagtgcctacagttcttaggtcaaggctggttgaggctgagtactaggactcaaagtttattctttataataatatactttaccaagtagtgtcctggggagtgttaaatactgcattccatccttccttccataatatagatgacttatagctttagcccttttattatccaatccagaatattaaaggatgaatttaagcaataccttttacctactattctgtggcattaccaaaatgaataaattagagttaggcctctgacaagagaaagaaaacttagggtttgtttaaatcaacactatactatattactatggacagtcttcactactactaagtgtgggtttggtctacaggtaagtaggaaagaggaatggggaaatatgggccagtgatgatttaactttgctgatttcacttctctactgtttgcactttccttttcaactagtatccatatgtttaatggtttgctcatttggtgatgcactgtagttccaaagcctcacatgcttcttcatgctaagcatcttaagacaggccgtgtaagggtttgttatactgtgcttgctgttaacagcccgaggagaaaaacaaccgatcacgagaaaatgacaacagaggaaatctgcaccgtattggtagcttgcccaccaaaggcaatgaattgcaactgtcaccatggtcctgccaagaatcaggaaaacaatttatgcattcggtatgccaacaaacatagggtgctgccccgaatatatatatatgaggctttaaaaaattatagtataaacattaataagcaggtaaagttctccgttctctccctagggaagttacattcttgtagggcgagagaagacttacagaatgcttcaacaaaatatattagctactagcaactatgaagaaaaaacaaccatcgagtagttgtgggaggggatggggcacagagaactaagtaaagtcatctagggtattggtggggccctgccactggagatgagccccaaatgatgagaaaactttgctctgtagtcctccaaatgcggggtggggtggggatgagtcaagttagcttttaagaatgatgacagtaggaaacattctgtattcatgaatgaaaaaatagatggccttttaaaacttaaaaaaaaacccaagctaattatcatctacttaagagaccaattgtttaagatcaactttttaagattctgctaattactcgaaaactacttaagttgactcaattactagaagtctttccaagctagagacctccttcacttgacaccattcaaattctgaatgagactggacccggccctgcagcgaatcagcgcctcctctgcctcattaacgcagccaggtggaatctagttaccctcccacaaaacacgaagccgggctaaggaaggtgggggagcccgacacccacaaacttactgtggtaggttcaaaacacaaaaccccgccgccctctcgcacgagctccccccgccccttcaggcgtcatcactcgcagaagggccgctctccagggtcggaggcccacggcgagtacgcgcgcgcgtggagcccgcgtgaatcatcggagcacggtccgccggggcgatgattcattcaccgctccggagctcgcggccacacgtccccggcgtactatgacggccgcacacgcagcttccttaatattaaacaaatgtttcaaagtacacacgcctgcagcgagaaacgcctagagccgggcgaggtggcgaggagcgagcgtcccggggcggcaggggcgcggtgggcagggcgggtccccggagctgacccccgaggcgcgcggtggcgcacaggtgggtccccgccgccctcgccaccgcgttcccgctcgcccctctgctctccgtggcatcttatataatagcccgagccgatccaaacggaagcggggcgcgcgctgccggggccgccgggcagaggtgctcaagccccgagccccaggggctccccacgcggctcccacgacagggggggcaaggcccgagcacccgccccacgcgtcccctcgcgaaggcgctcggtcgcgctcggtccccttcaggaagctgcgagcgtcaccaactgcgtcagcttcttcaaacactgtgccctgtctctctccagcccgggagccgccgccacggggccagggccgcgggccgtgcgggcaggcgcgtctcgggggaggacaaagttcccggggaccctcccgtcgcccgctcggcccagccgcgccgcccgcacccgtgccctggcgtgggcaacttgggacccccgactgcgcgcggcccctgcaacccgctgatctcgcaaggctcccgcggcggggaatctagcccagggcccagcggaagaacagccgctctagaaagttccccaaaccgggaagccaccagcggggtccccgagcatcgctcttaccttgctctcgggaggccacgttccgagcgggccgcacggggcgcgtggtgcacgagcgcgcgcgcgtggggcggtaggtgagcagcccgcgcgggcgggggcggagcagggccgggtggcagggtgcgagccgcgcgggcgggggtccgggtggccccgcggcaggagggcgggctggcggggccgcgggggggggggtggggaacggaggacgacagcagtctaacccgcggtgacggtgacggtggcggcggaggcggcggcgatgggcgcggggcgagcgcgccaagggggcggaggagttgccagagggtttgtttacgcattgctgcccggctcggggcacagcccgcactccctgattggacacaaactggggcacagcctctcgccgccgcccgccaggccttctggagcagccgccgccgccgctgccgcttgcttagctcccggagctcctgccgggcacagcccaccgcagcgccccggcctggaggggcacggtccgggcggcgggcagggtgggcgtggagcgaagcggccgccgggcgcttggagtagcccacctgtagtggtgcgaccttggcaaggagaaacttgaaacttctctggcttggaggctgcgtctgctccagcgactgattagatgccccccaactccatctcctccaccggggccctccccactcccacaggaagcttgcccttgaggagatagaaaagcagctcaaatatcagcgtgtctttggtcaagtcgaggcttcttatagaaggtgacggtggactcccgcagttctcttctgcctccggctcccctgcttttaatttcacatcttgcatatgacattcaaaagttgtcctcccagaagtgacctcctcaccctggtgctgagcatcctctgaggacttcacgtggtctcagcttcctccacggccggatctccacagcttcagcatcctagctactgtccaactgtcatctcagaacctatgcctaaatactatgcctagaatgctttggtagatttgcatcccccggatcctgtactgttctttgccagggagcatcagggttcctgctacctgtgcaggtgctcccagactcggctcccttcttctatccttttgtatttagtcttctggactctttggcgactgacatcaatctgacctagggatcagtcgtgtacctatgctgtgcaccccttccctcccattctgtagatttcttaagggccgtggccaagtttcagcagggttccagcaactgggagaaatgaaactggaaagaacccctgttgtcttagtgtctgccattctgctgggtccagagcacttcgaatctctgaagacctgagagcacaaacctcatcgtgtcaaaagcaagctcttcaaaccccaagcgtgtcctccacgtttcctgtcactgtggtcactttccacatctaactgtgtgcctctatactcacagcaggcctgagtggaatgtgactgagtgctgcagaagtgtccctaaggcaaggcccatagtggccaaggtaaacaaagtacacaaatcatgaagcaacagacgcacattcagtcattttacagatgattagggacactaagccctccagtcatgaggaaatccatggattcatctgtgactgatgaaacactgcttctaatatgtcatgggatggaccctggtccttggctcctgagatggctggatttcttattctagatatgctgtatatggtcccattgggaaaacgtctgcactctggaggagcatcagatgagcgttttctctctcagataattcaaattagttacaaacacattgcgagaaatacaaatgcaaccaggggagggtgaggctaccctgagattggtagcacctagaagcaacttctcccctagggtccgagcagtggagcagaaatcacagagtagagctagcttctcctggatatgccttcagagcaaggggttctttcctcgaccctttcttctcaacctccacagtcagcatgtggagaaagcagaagctagtgtaggtgtgacgaaggctcacacatgacaatcgtcagggaaagcagaatgaaactgagagcatagtgacaggtgtcccaggctggggtacagcaccgggttgcctctgggactcatccgacaggtcactttctgcaatgtagccaaacacccacccaacccccgcccccagccctggcgctttgttgtcctccatgtatcttagctttctttctccttctagccctctcttttccattgtgacttccttgggctttcctgtcctcaccctctctcacttttctctttgtgtttccttcctgactcctcctaattctccctctctgagttcttatcataacatccctgtgcctgctgtgatatgaaagacttgtcctgcttcccattaaggcatttagagtaggcactaccatgttgtcaacattccccacacagtgctagacagtttgtatacgtcatcttgcttagtcttcaccatgcactcattggtcgagcaccacaatagtgtgttcagaaacacagattaaatcctaaatatatgtacagtccatgttatccaaactatcgtgttttaaggccacaaaaagtactgtctagcccaaagttttttaaagtaagagatctacagcctgcaagattccagtacctgaatatcaaggtgattaaacagggccattaaagtctacccatattcaaaatctcttctttggtaaatgttgagttgtatgaccttgaacttacttatggttaagtttcttcctcaacgtagtaggggaaatgatgcaatgttcttctgaggcttttgtgaaaattaaacatatataaaacactatggtcagtttggacaacaataacaaaaacaacaaaaacttaaacaacaaacgtttattttttagatttgtagaggcagaagtttgacaccagggtgctattgcagccagaattctgtaagaacatgcctcttttcaggactgtacattgtcaactccttgcatcttggcagtagaaagagagagacacctacattgagatccttttctttttggttttggggtttactttgcttgtttgtttgtttgttcatttggttggttggttggttggttggttggttgcttggttggtttctccaagacagggtttctacatgtagttagccctggctgtcctgaaactcgatctgtagaccagactaatctcaaactcacggagatatgccacccttgccttccaagtgatgggattaaaggtgtgtgccactacctctcagcatactagaatccttctcatgagggcacccatctcattctcacaaaccccaccattaccacctaagctcctcccaaaagcctcaccttcaacaccatcacacaagatgaggatttcaacagatgaaattgtaggattcacagatactctgcattatgagcatggagcacagtgactgagaggtagaactcaaaaaatatagatgcattttatgatgcttcccatgccatcaagctagaagatgccaaaaccagaacgagcctcaaccttttagagccctgattgagcatttctgatgctgggagttttagtgtatactacctgtttgatgccatctgtgaaaaaacacagcactctgttagtttgctatttgaaaagggtctcagccaggcatggtggcacacatctttaatcccaacacttggaaggtagatgcaggtgaatttaccaggccagcctggtctacatgatgagttccaggacagccagatctatgtagtaagagcttatctcaaaaaaacaaaatgacaacaaaaagggtctcagttgtatttctagctccaatttctcagtatttcctcatcatccctggctgcactggtatactgaaaaatcccaggaggaggtagggagcataaaaatgagttatggatatttcatcaccaacaatagtttccaaattctgatataacaaaacttaagtaatttacatgtcagaaaactcaaagtcatctagcccagaagcttaaaatagaaggtccataggagattcactgggaccatgaaaaagccttcagactgcctagtctattacagagtaccctcttcctctcagtcctggtcctactgttcaaaactcccttagccccacaagtattatgtagcccactgtcagagcataaacatcttgagacaatgaaccatttgaccttttagtgtagcaacctagtcagtattgggagcaagacagatgccacatgttctggagctgcctggtataagcagtggcacacactctgaaggaatctcttcctccccacccttcagaccatgtctccttgggtgactgtcatggctagattctaccctacaccactaatttatataaaaattcagcttctaagtgtgggataaatgtgcaatctacaatataaagaacatttgaagaaattaattttaatgatgtaaatcgaagcaataatttaagagggtttggaaggcatttttttttttttttagccacagactttttctaacaccttcaaaccacacaatacaaagtaaaccttatccaaaagtaaaggctacttaactaccaccattatacacatagattgctatcattaatatagaggttgctcaattctacatatggctatattatcctgtcaaagtcagttcttaaaagacacagttttccttcattttaaagtcagtaattggtctacttttctgtattacttcaaaaccaagtttataattcaatactcagtctctaaaagctacattgtattttcccaacttcacttacacgccttttctaggaagttgggaggaagcaaaaagcttagttctagatcaactactcatttcattgaaaagaaacagagacacaagaaaataagagtggcatgatagttcagcgggtttaagtgccaccaagtataatgactccagttgaattcttgggatccatatgatggaaggagagaaccaacgcccacaaattgtcctctaacttccaagtgcaagttgtggtatgtctctctctctgtgtcgacatctacacacacacacacacacacacacacagagagagagagagagagagagagagagagagagagagagagagagaataaaagtgtaaaacaaacagtggcaatagtcttgcattgtcagagcacacactcatgctctgtgtacttatcaggtgtctttgaaacatacctggagatgaaccacattgccaaaacacttctccaattgtctatttctatcccacccactggggcacttttgaatggaggtgggtgacctttgactccttctttttatgcttccacgccctcttcagtttgtctcccataattgtccttttggtctgaactaggccataattcaggacaccttcactttacaattgtattagaacaatggtaatggcttttctttctcccaccgctgtctcttacacagtaaccctagaagaaccattttaatgtaacccaactttatatattaatgataagatagtactatttgccacgtacaataaaatttagcatgcatttacaccttcaataaaatatgcatttgtgattgttaaaccatttcagttctgaaatatattagtgactagctgtgtccttggacagacttaacttcttcagtgtctttagatggtagctggtgatattagcatgtgtgcctaactcctaggaagatttgggaactaaacaaagggataacaaatataaaatgtttgaaacaatagttgtgatagtctatggtatctattgaggtctttgcaagaatttgagatcttcaaatgaataatctaatatcaacctttcaacatagatgtcattactattcttgggtaagaaaactcaggcctggaggaattataaaacaaggtcacctagctaagaggtggctgagccaggcttcaaaattgggcaagcctgtatcctacagtctgcttcttgagaagaactttcagattttgggttaccttatatcccttatttattatcattaataatgccttacagtgaagcagaaactcctgccctactctcctttaggtttgtttctgaaatcgggtctcagcaccactcttgggagagaggaatatgtcaaggttaaaggcagtgggtatgactgtttctgctttttagaggggcaagaaggatggtttcctgtgctgtctggacctcctcatttctctgctcccccatttccattctgccttccacagtagtttctgttctgtggttattccttgcacttgctttaagacgtaatactccacttacttaactctgttctactccagaagatgatttaggaaaggcaatccacccaggcacttcccagcaaatatttcttttgtctctgaaattttttcatttctttcctttgatgtatattgtgcagtatggttatgaaatggttccacttgactgtctttaatgatgctaaaaaacaaaaagtatcctatgtctggtattccatgaattcttctttgggcttgtattcctgcattgtatatggctttctgtgctttccctactctcttgcttcgtgtgtgtgtgtgtgtgtgtgtgtgtgtgtgtgtgtgtgtgtgtgtgtggtgtatttccctctgagcatctggctgtttatatttgaacatctggcctttttgattaatagcaaaaattgaccttagccttctaataatgagatttttatagatcctagaatcataaaatgttaaagccggaaggacttttgtagataacaggggctcacacattcctttttatagtgagaaccaagccacatattagaggaatgctacatggcctatagcaagaagaagcctcaggcaatcccaagacatagccttcatttcttccttatgagttgggttaggacacctgaaagtactaatatgtaaaatttataagtatcttctcccaaaatggttaagtacacatattagtgattttaaaaaactttttttccagggggaaaggaattttaagaatgaaaaaaatcatacacaggcagataagatttattaagaactgggtcatgatcatgtttctttcccagtggtacctgctacagtgttgctgcacagtacaatctcaacaatgttgatgactatgatggtgagttatgacaaggtctcatattcctgtgttctcagtcatttgccactgttttgttcttataatgagacaaggggtgggaatttagtagctgccatctacggtcataatggtgatgacttaaagtgacttcagatggaaatctctacatgccaccacaggcacaggcacagacaggtagatgctatgaagcctttctagatctgaggaagtgtgtccctaaattttaccagttattggaaagaagcagtctctggccaaatagtttggaaaatatcaaataaaacaaaatcatgatttaggcttgatttgccttgcttctggaggatttctcagtgtcttttaaatactgatatgaatcctgtagatttgtaagtgggatggacattactatatagaattatgtgaacaatttgaccttaaatcaatatctatttgacgtgtttccaaagggttggtgtcatatagaactaactttggaagtgttgttctttgggcttcaattagacaaatcacatatactcagtttgctctaagactagctattccacatgataagatcattggcccaaggattatttctttcttcttcttcttcttctcctcctcctcctcttcctcctcctccttcttctcaataattgatactgtgtctcctctcctcagttaccatttcagaacttagatgctgttatttatttcttggtttggaatttctccatcagggaagtcaggctatttaagactggcctcacatatgagctgcacagttcccataatcacttcagctaacctgttctagtcacacagtttttagtgcagttgtgtgtgtgcatgcgaaacgtgcatgtgtgtgttgtgtgtgtgtgtgtgttttaccttaactacaacaatgacaactagcttttattgaatgtgcattgcagaccacatattgtgctaatagctttacatgtaaagtcccacctaattattaccacagtcttataaggaagtattaaaagtatttctgctttacatatggcgaacttagaaaataacttaagtaactttgcccaagaagttcccacatttatgggaaggggataagcaagattggggtcaggactggggcttttgtttaactcccatctgtcctgcctttccgctgttagtttgtttttaaagaaatgtcaaaaagcagtggcctcctggtccagccttcagagcttggcatgacacctggcatttggagagagagttaagaaacttggccaaaccattcaggcaggaaatgatggagctacattttgaaactatatccatcgtgcattgttttttaacatctaaaaacttttagtttttactttattaaaccagcataaactccaactacattctaaataattgtccttatgcccataaataagtgttgtctcacctctcctcaagggaacatctccttgcagcagacagagctcattacaaaaacaccatcatcgatcacattgcagagttgtgcagcccagtcccaaagaatgaaatctacaaaacaactcctacacctaaggattggggaaccattaaatttaggtgtggttttggtgttccagaaggtggattggaagcaccaggaactcataagtctagccctcatggggctttctctctctctctctctctctctctctctctctctctctctctctctctcgacaggatttcttttttttccaactttttaaatttgaattagaaacaggattgttttacatgacaatctcagttcccatctcccacctgccccccccatgaaaaccctatcacatatcctttctgctccccctggatggtgaggccttccatagggtgtcatcagtgtctattgtatcctttgggatagggcctaggaccattcccgtgtgtcttggctcagggagtaaccctctgtgtggaatgggctcccaaagtccacacctatgctatggataagaactgaacttctacaggaggtcccgtagatttctgaggtttcctcacagaaacccatgttcctggggtctggatcagtcccatgctggtattccagctatcagtttgtcaagacaggatttctctgtattgttttggagcctgtcctggaactcactctgtagaccaggctggcctcaaactcacagagatctgcctacctctgcctccccagtgttgggattaaaggcgtacgacaccgatgcctggctcatggggcttttgtaggagaacttggcaaccatccatgagggccctcagagctgtagttgctattgcactccaagagacaacaacccaaattctcacaggtcatggggttgtgggtagctgaatgcttcctggccaactttgatccctttttctctctttggtcttggtctccatagttgtcatcttcagcagttgcccaccattcatcatgtgggtttttttccccccgaaactttattacattgggttcaactgtccttgcttagattctcctccacacacaagaaatctgggacatctcaataccctggctctaaagtagggcaaagctgggtctctaacaagtgagctgtctggttgagtgaaggcaatgtggttgtaaccctgtagaggactctgcctgctctgtcttggacaggactccagggatatgaaaggaaatatctgtcttatatttaataaatatggtgggcacatggaaagaagaagtcagaatagctttatgaggttgaaaatgatggactctgaaataccgtaggactcacagggtatgcttttttaagccttggggtcccaatcttaaaactaataccaacctaaccgagcagaaaaggaatagccagggaaatgaggtgaactaccctgtttccagggcaaatactttgcagctcagaatcatcaaaaagacagacagtggagaatgagtaattctaggggggatggagaagatgggttcaggagtgcttggtacagcatacaacaaagaggaaatttggtaataaagctatgaactctttacagaagtaggagctaaggaaacaactgcacagatcattctgcatgaacattttgtggcctataaagacgagatagatgatcctaagaacatgaattgtgtgtggatggaggcagaagctatgaacttctatagtgaaataggtaaaataatggaccactttcccctaaagctgacaatgatgttaaggaggctaaatgtgttagggaggtaaaacaggcagacattattgatatactcaaactttacatcatccacttccaacctattcaccttgtcatgaaatgaggtgccttctggagaagggatctgtgccccgactgtcatggatagaatcttggagtctcaagggcttcaaatgagcaaggattttcactagacaggctgctacttgggcaattatttcccaaattatgcacagcacaaaaatattagacaaatataagagaatggggtcataaatgtgagggtcctgaatcagaagaacgcgacgtgaatatgttttatatgttatttaagccaaagtgcacaattaattttctttgagaaattagatcaaaacacatttgtctcctctaccatagcctctacttctcagccattttgcctttgttagttctccctccaaccatgttgggatgggactacatctgatatgtaatctgactgtcaggagtgatacttgttttccaaatttaggcatgaggtcttgcatcggtcactgtgagcagtagccttctggtgatttttgttttagagaccggttttatggggaaaattcaatctccattttagtctataaatatcaaatatttacgagccagaccaaaaaaatatgcaacaacaaggagagtttaagatccagccctctggttaccataactgtttgcatctactcagagcaaaataagctcaggacattggcttcctcttatcttagaaaaggaccccacaaattcagatcctgtcataactatcaaatttatgcaatccaagcctggtgaaaacaaaatttacttctctttctctcagtaacacctcctaagagatcactatacaatagaaaatggtgtatgtagccatgtggtaaatggtagctggccccagatagcaagaatatgtgaattccaaatagcaacggtaggttcaaaacaacttcctttcccatcttgtcacctaaaacacggcagttaattttatttacttcacagcacaacattgagcttgcttgactgggacagtagagattactgcagaagttggaatcctcctaaggaggctacttcaataatagccactgtcccttacgttctcctgctggtgtgcaaggtttcttccagcgcttcatgcgtggtggcttatttattcccacgactgccctaagaagagagtacaatcatattgcatgttgtactccgttggaagcagccttcaagactgagataagcatgtttactagggagtggtgtgagcatccacagttggggaggagagagaaaatattatgcctgttttatggaacagaagcatgtctatctgaagcatatgtgtaactgaagcatagcgacgttacagagcttgaacaaagttacacaaggaaggggtggaactaaaattagagagcaccagctattaagcatcaccattacactgttataccatagtccacttaataaccaccctcgcatagacactgggttccctattcactgatactttagagaaagtgaagttatagctctctctctctctctctctctctctctctctctctctctctctctctcgtacacatggccatggccagcatctcttccttatacttgaaggacagctgcacaagtccattgatttttctcttgcaaactggttttgttgctgtggaatgatgacagttgtgtgtgtaaaggttcactcatggaggcacagcattggccatccttgggaacacatttcacacatcacttttacttgtggtattgtacaactgcttcgttttttgggtggagtcatttgtcttgtatattagctttccttagtgactttttcaggagagacatgccaagcctttatttgaatagatgatgtatctcctggcttggtatgaatattctacaacttcattagtttttcaaaatgcaagctccagaatataatatatatatatatatatatatatatataattatcacaaaatatgaaatattggaagccttaaagtaactcaaatttattttttgtagacgagaatgctgtcatcatctcccaccaccccatcagaaaactgttcctccatccatctctgctaaatggcaccaaaacccacccaagttgaacaaaaaaaaattattgcagaatatttccacccatacacatgtaactaatcagtgacttgttcaactttccctccaacaagctatatccagaactactcactatttcccaccacagggttcccctctgtcactcttgtcttccggttagaaatttttcaccgagaatgaaatgatatttaaaaacaaagtctgttacctcatattccactccccataaaagcacccaatctctttcatttgtacataaactcaaacacaaactcctccctgtgagtggccttcctgtacaccgcagtaccggactaacctggaaacgttcactctggcgggatgagcattttctccctagcacactccgtgcctgcccatatcttcacagtttggtttcatataaaggatgcaccctctgagatgggtccttggccaccatagctcatccaatctcctacctcaccctgctctgttcctgcacagtatttagcacccactgaaattatcttgtacatttcctgtcgatcttgtgaaaaagagtgtcctgagagcaaggattttctgtagtggtgactactgtagccccctcatgtcagccaattatttagggaaaataactgctcttgacagttttctatgtgcccttctttgaaaactataaatcaatcacaatgcatttggcctgccttttagaaaacttttcatttttaaataattacagttataaaaatagtgcacagcatgctcacacaacctttcacccagcttcccagaatgttgaaaactggtgaagagtttttaaaaaaaacggaacatcgttatcaatccaacactatttattactaagcagtctatagctcttattcaaatttttttttattttagattgtagagtacaattttttttagattgtagactacaaagattctgtatttaacttaattatcatttttttatttctttgaatctgggaaagttccttaacttttgttctttcatgatcttgaattttctattaaaattccccacaatctggattactctgacattttcttatgaaaaaaaaaaacaagattaaaaatttgtggtaagaatagcattgatgtgttactgcttggccagactgtcacattgaaacctttcattgtagtctgttgtagatactaagtagaatatgctgtatttttaaaatgtcattttaacatacatgtacattttactcacacagctgaatacctgtctgtcttcatctcccacttttcttcagggacttggtagccagacagctctggattttacagagcattttctctgtcctttcacctcaaattcttgagatgatatttgaatcctatgttatcctggtgtattgcttgtctacacacacacacacacacacacacacacacacatcaatgatgaaactattccacaaacgcactgacttaaggcaacaaacacccaattactttgacagttagcagaagtgggttgaatggtagttttgcgggttacaactggcctcattcactcgtcttagaactgacatgctgttggctggttcagggtgacctcagatggaattaagagccccttggtgccatatgcttctctttctctggtgataatctaggtaggttcttaaggtgaagtcaggtggaaggcaccaagtcacttctctgcctcccattggacaaggtaaatgacacggtcagcccaggttcaacaggtaaggaaattactccatttctttggtgaaaggaaatggcaagtcatgtcaaagggtgaggatacaggcaggggtgaagattcagggccatttatacatgcagtcatcctaaaccattgttctttttctccctaacagttttagtaaggtataattcaaaaactatacaattcacttatttaaaatgtatagttcattggttctgactatattcacaaggttgtaccagagtcacttttagaatattattatcataatattctgttctcattaatcacttctatttcaatccaaaacctaacatctctttgggtctaagttccaatatatggattttggaggaatacatacattcacaccatagcatgtatttacttatttaatcatatgtcaccattaccctcctctacactttgactgtaatgaatattattttgaagtaacactctctgggtgctattgagggtatcttagaagaattatttttcaagtattgaatgtaatgcaaattaatcatttctattcttcatcttacatagttatttcatcagaggagtattcttttgaaactatttccagagcaatgagggtcttctgtctgcgtgggttatttttggtagaaaagatattacagttgcttgcaatttcataaagaaaatttctttatggtttctcactttgagattccgttaaggagaatgtgggaagaatagttttggtggtttgaatgttatcttatgttcccaaatgcccttggatttttactatagttttattatatatagtgagacactatttcacatcccaactctcaatttaagtttgatttggttaattatttgccaaaataaccacagtaaaaatccactcactttcttgttttgttttgctttttgagtcagaatctcattgtgtagagcaggctgacttgaaatcttcctgcgtcagcttcctaagttctgagtctccatgtgtacaccaccatttcaggctcattttcttttataagcagcaacttacttctttgccagctatggagactcagatttccaattccatttggattttattgacaggaacaataatcaattccctagtctgattaggactctcatggatgtagcactgaattttctctatgctggaaagtcccttagtctcaagtaaacctgggcaactggtccttaggggtgttttagaaaacagtagtactcgctgtgctccagacactggaattacagtggtgagcagtacagacacagacacagccttcttgtcacttcgtacctagaccatctctacagcctggggaagtgagcaaccaggaataggctgggatttgactatggagattaattttaaatgtgttattttctaagtggctaccagtattcttcagaaagacaggatgatttccactggttttgtattgtacccacattcaagtcttaaacttgtagtgagtttttgatactcttgaatgtttctgtattacacaatcactttgcctgtgaataaaattattttctttctttcatattcttttgtgtctttactttttgtgacttgctgcacgaagacttggagagtggaaatagtggtggttgggattggagagatggctcagccgtgttttctgctcttgcagaggactgtagtttgactcatcacactgtcaggtaactcacagctatctctgactccaggggatctcatgcttcctcctgtcctcggtgtgcacctgattcgcacccacacacagacacatgaggaaaataaaagtaaccattaaaaatgaaaaaggaatagtgatagtgtattgcataacctcagtcttctttaaaggaaaaaattttaatttcctcactgaacaggctatctgatgtgactttgggggaggagaaccattacaagactaaaatttccctccattaccaacttgctaaaagtttttataataatttgcttttgctgctgtctgatcctgaggaagttcctccaatgtcctctccaaaaggggacaggtagacatataggtcattctaacagctgacaaaaaacatcagctggcttccaagacctcaaagactggataaaatattgccccagcatctagaatgtcagtggtagcagcaaaagcagtagggcccagctctaaaagccagggaagggatggccccaatgtgtagtagaattccaggcacacactagaaggatcagcacagaacaaggccaatgaaggacctgccagaggcagcatgctgggaagtagaggtgcccagtgggacttcaggaggtgaaatgtaagtactgtctttgtgcttgttacctgggtgggctacatagcaggccgactggtagagtcagagaaaaaggagctaaacaaagaggattattgaaaaccctaaatgcagctgccaccaagaatgcaattctgtaacttctggcctcctctgtgattccagtcttgtgtttgtgccaattcctgttactcctgtcagcctatctcctctgttgactgaactgggtggagatcagagggcctagtgtgttcagacttttatattgtttcgtataatgctgcccctcacagcatttattccagcgttgcttgactcatagttgttgaattcagtgaagagcctgactgcagtaaggaaagaaggaacaaaatcagaccaagcgataagaactagggagtagccaggcgttggtggcgcacacctttaatcccagcacttgggaggcagaggcaggcggatttctgtgagttcaaggccagcctggtctacaagacgacagcttccaaagctacacagggaaaccctgcttcgaaaaaacaaacccaagccaaaccaaaacaacccccccacacacacacacaaaagggggtgagtagccctaaggaagagtttgctcatgttgtagttactattcttggatcaggaccacctactggagggtggaatttggggtgatgcaaattatttttagaaaagccagtctttaatcccacaagaaaataaagacaacgcatttcatcctgagtagtgatcaggaatagctacagaaggctatctgtgggtgacctattacataacagtgaccacatgctcgaatctagaactagagggagaggaaaataagaaaaaaacaccattaatacaccaattttaaaaaagaaacaactcatctatacccatacctccctgaagctaaaaaagaaaaaaccctaaactgctaggttgaaatgaattcttgtagttacttaagaaaaacaatacaaaagggaatctaaagacattgaaaatacttttgtgagcaacaatgtcaccaattttgcaaattagatgttggaaaaaaaaaacataatgttcacgagcacagtggaagaaattgctgaaggctggaggactcctgagggtgaagaaagggctctacagacgtcagacacagagcgcatgcacgtaacttctagactggcttcacatcagggttagaccagagataagctaggacttcaaatggaatgctagcctaatacaagcatctctgactaagactttcaataagtcacttgagcggcaagaacaaggatactgaattaatcataaactatttgggaactgtcctctaaggagacccagggggatttgtaagagaaactgtgaccacagtggactctaactgacatcagcctttgatgacaccgcactaggcagacaatcccaggctaagactttgtgaaaccaggggcagagtttactcaagggcaggcgattgtctttgaaacagaaagtttctatagctaaaaggatgcttttatcaataataagtgcagagggcaatctgactcaacactttaatggagggtctaggaaggcagattctctgtgttttctcttaacaccaagctcctctgtacagagaaacacagctgttgctcagtcaagctgcgtgagcccaccaaagcatgccagcacagacaacggttagagagcgcacacgggcaagatgatctggtttgcaatttaaagagagtgcatcttacactgggccagcaaatctgaccaaataagcagctctacaagttgagctggcctaacaagtgggttttggtccccactatagaaattaaaatgttttgaagagtccaacaagagtctatcattaatgtgaaatttataaataaatccattacatattaatacaaatgaacgattttagtaaccatatttttaaaagctaaaatgctattgttttatattttttcaatctcttttcacaattggactatataaagtatttcagtcttctttatacaactctcacagagtgtccaagttcaattccgagcacctacactggatagttcacaactgtaattccaactgtgaaggatctgacaccctcttcaggcctccagaggtggctgtccttatgtgcacttatccacacaagcacacacacatacacagaatttaaacaaataaataaacaaataaacaatgtaggtgttcttctttgatgatatactaaaacacaatcattattaaattgaagatatttctttaatgtgtgtgtatgtgtgtgtatatatgtgtgcgtgtatgcacattctgtcacatgtgtgcacaaatatcattgcgtccatggggatgatttatgggagttgctcctttccttctttcatgtgtgtcctggggactgaacacaggctgtcagacttagcagcaatcacccttacctgctgagccatctcagcagctcagtattaattagctttttaaaagttagttacaataggagtctgaacccttgttaaattgtcatgtgctgtaaaagcaaatgatttgtcttgcgccttatgtccctagtccctgttgttaggtgatgtttgagtgtagttgtgaaagtgatttcagttttgacattctgttcagtaatgtgtgattttgttttgttttgtttctgagaaagttatgcagctcaggctgtcctcaagcttatggccccacttagctcagtctgcctagtataggggttactggggtatgctgccatctctggcttttcaacttcatttctctgaaatgacaggtttacttcattacttttggagaaaatgtttgccaagtcctacacccaccttttgcctgtcattccttcaagttcaaactggtactctacggacaagtcaacaatggagcccacagttcaacatcatggttgcatttcccaagaaacccttagattcaaaatgagacagtggtgatttgtgtgtagttctcactcatcacttaggcattaaaaatgtgttatcaatggccaacactcaatcagattataatcttactaattcatcaaggacactcaggtaaaattggctttaaaacaatggcaagtgcacagtgtgaacgatacaatgacagccgatgatgggccccattggttctgcccatctttgatttggaatgtaagcactaatgctatggtgaccaaagcaagtggatttgtattgtaataaagattattttatttagcatgctgcccctccaagagtgtctcaagcaccccaaagattatgggtcactctttaatagctacatacattgcttagactgagtcctgcacatactgtttcatccaagacaacctaggaaatgcagtctcatccgcctagcatagaaattaaatatgaaaatctcctgaaacttaaatatctgcttctttaaaaacatggctcttctgtagctaaagtacattttttttgcaagtaagaaagattaattcaaggagagtatctaaaattattcaggattgaaggagctacctataagagaagaaggaataattagaatctttctttggaaagctggagagttgtttaaaagtcgtgatttcactggattggtatttattgagcatctgtagagtgtgatgtgttatgtaaggaggtatagatctgtgtccctgctctgacaaggactggtgtgcaactagcaagctagaatatgaaactgtaataagagatatgagaattccaagaactaaatatagataaggaaaacaatattagaatttgccacaaggcaatgagatgcaaagtggtgcagacatttagggctctgctgttttcagtgaatctcactagtcagagcttcacccaagacctgtgaccctgattctgagaacttacccctgccttggactctaccagctactagtgagacccataccaccagctccacaggagtttcttactggctgctatcgcaggatagccgtgttggctagtttatgttatcacaaactggagtcacctgagaagagaaacgctcaattgagaaattgtctacattatgttacgttggctgtgttcatgtctgtgggggcattttctgggttaatgattgatatgggagggccaagcccataatggagtgtgtcaccctggggcagatagtcctgagttgtataagaaaggtagctgagcagctatagaagcaatccagtaagcaggtctctgcttcagttcttgctttaaattcctgccttatctttccttgatgatatactgtaactcatcagtcagacaaacccattcttccccagagttgctcttggttggtgttttatcatagcaatagaaatgggaaaagatcttcaccaaccccacatctgacagaggacagatttccaaaatatacaaagaactcaagaagctagtcaccaaaacaccaaataatccaagtaaaaagtagggtacagaactagagaattcacagtagaggaagctaaaatggctcaaagacactaaagaaattgcccaacattcttagccatcagggaactgcaaatcaaaacaactctgagataccaacttactcctgtcagaatggctaaaatcaaaaacaccaatgacagtttatgctggagaggatgtggagaaaggggaacactcctccactgctggtgggagtgccaacttgtccagccactttggaaatcagtatgctggtttctcaggaaaatgggaatcagtctaccttaagatccagaaattccactcttgggcatataccgaaaggatgcacatttatacaacaaggacatatattcaactatattcagagcagcattctttgtaatagccagaaactggaagcaacctgaatgcccctcaactgaagaatggataaagaaaatgtggtacatttacacaatggagtactactcagcataaaaaaaaaaaaaaaacaacaaaatcttgaaatttgcaggcgaatggatggaactggaagaaaccatcctgagtgaggtaaaccagtcacagaaagacaaacatggtatgtactcactcatatatagatattagacatagagcaaaggattaccagcctacaatccatacctccagagaagctaggaaacaaggaggactctaagagagacagacatggtcccccggaaaaggggaaagggacaagatctcctgaggaaattgggagcacagtggggggagggaggagaaaaaggaggggagaagaggagtggggaagataacatgcagatcaggaagactgagtccggggaagaatagaggagaaagaaaaagagagataccttaatagagggagccagtataggtttaaaaagaaatctggcactagggaaatgtccagagagccacaaggatgaccctcaactaagaatctaagcaatagtggagcggctaccttaaatgcccttcccctataatgagattgatgaccaccttaaatgcaattctagagccttcttccagtagctgatgaaagcaaaagcagaaacccacagctaagcactgagaggaactcctggaatccagttgcagagagggaggagtgatgaacaaaggggtcaagactatgctgtggaaatccatagaaacagctgacctgaacaagtgggagctcaccagaccctagtcagacagctggggaaccagcataagactgaaccaaggcccctgaacatgggtgtcagttaggaggcctgggcagtctatggggcctctggcagtggaatcagtatttatccctagagcacaaatggacttttggaggccatttctctatggagggatactctgacagcctagatacttgggggagggcctaggccctgccccaagtgatgagacagactttgatgaggcctaatggaaggcctcattctccctggggagtggataggggagggattgggggaggtcagtggtgagcatgggaggatgggagggagagggaactggaattgatatgcaaaataagattgtttctaatttaaataaaaagaagaaaaaaatgaaaaaaaaagaaagtcaaggacttggggcattctttgcttgcatttgttcccactaagctttccttgatgtccaacctttagggagtttgtaggattgtgtttcaaaagcctaaatatttatcttgagatatttatgtcatgtgacaggtatgggaaaggaaaaatgggaggagtggagatgggcatggaatggaggtgggggtggggaaggacggatgaaagagcaggagagacttagggaggtgatgggagccccaaggggctggctatgaggcatggagggaggaaaactgtgccttagacgaaactagcatatgtggcatgaacaccagctaccaggcatcctgtgaagagagccccgatgaggaatttctagatggtgcccagaggatcttggactgtttgagaagaaaaccagttaagttactgactataaattcctttgcattttgattagctagaaagctctactctcatactctctatatgtcatgatgcctagaccctgtcttcaatctcttaggttcgtggaaacttggtgagcatttgctagaggggaagtacctgcaatcgcccctgggaaaccctgaaactctttgggagggaggttcagaaggctatggagcctaatgtttttcatgtcaaaaacaaaagaggaaaagaatatcccggttgataggcaagcacttttttgtgtggcgagctttgcaaaggtctaaatcagggcagaattcacagttcctagcaaggtttgagctacacatttgacttatttgtcaacatgatggtcatatacacactgcccgggtttgccatggcttggaaacaggagagaagaaaggtgatgaggagagagactaaaatgccaactgagaccagaaagcacaacagaggtggattcccagtgtatgtgactccttctgtactctcttctccttctggtgtggtggattatgataatgtccatctctccagctgtggaaagtgaggtcctctctctctgtttgctccagttgtagatcggccaattcatggcacaacttggggaacaaagggattcttccaagaaagtaggatttgttaactttctgagatgttgggcaatgactaggcattccaaagcctatttgcacaagtgtctctagcttagctgctctcaacctgtgggctgtggcccctttgggagttgaacaaccctttcatggcagtcccatatcagattttacaatccaatttgtacagcaaaattacagttccgaagtagcaatgaaaataactttatatttggggtcaccatgacatgaggaactgcataaaaggaccacagcactaggaaggttgagaaccagtgcaccagctggatagaaaaggcattttccccaggaggagttgagattcaaggacaagggttgtagtaagataactgaggtgttttcaaataaaattagcggtatcagaaagaaatataatttggtaactgtaaaaaaacgtgacccatgagctggaaagaagatatttaatagaagtgacaggtagtgtcttgagagtataaagattccttaaaaattgatgaaagacaatagaaacaggcaggatatgtctacagtttttttttccggtttttgtttttttgggggggacagggtttctctgtgtagctttggagcctgccctggaattttctctgtagaccaggctggcctcaaactcacagagatcctcctgcctttgcctcccaagggcttggattaaaggcctgagacagcactgtctggctagtctacagatgttttatagaataataaagagaaatgatcaataagtcaatgaaaatattctcaaccccattattgagtaaaatgcctactgaaaacagagtgacacactaatccatatcactgaattggaaaaaatagctttaaaaggttgtatgttgtcatagagcatagggagttttcacaggatgttagaagaaaagtaagttgtaaagtagtttgctattgcctagtaaagtcaacactattgaaaagattgtgccatctctggaaacagtctaaagaacagaagggggaataaaacatttctcttaattttcaagataaacccttagttaaaaaaatcatttttatcaatcatgtgatttttgacaaactataatttcattatacctgtattataatgttatattttctaaagtacctcccacaataatttcccaaagttcattttaggactaggttatgtactctaaatgaattattgcaaatacatttcagcaagatgtaaaagaaaaaaaacccaaagtccaataagagtaaaacgtataaataagttgatgtgtatctgcacaagaaaaaactctatagaagtacacattgaaaagctacagcattgcacaccaaaatggatgacccacaaaagtaacatggagtgttggaagcaagtcaaagaatggtgtatttcatgtggtgttcatcaaagaaagtaagaaatgtattgtttaagcagaccaactcctgtgacaaaattataaatagtacaatggaataattagcaagacatgcagaccatggttagaggaatggaggtatcaattataaaaaaaattagggaacttccaaagtatgaggaatgttatattttaagaagtacactagtatacttttcattattattcttattttataacatataatcatataaaatgttatgatgaaattttaatttgtaaagatcacctgatagataaactattttttaaactaaggggcttatcatgaaaattagaggtatgttttatccctgctgtgtctgttatcttgtttataaagatggtacaatattttccaccttttgtgtgctgtggcattgtgtgatttttgtcacccatcctgtgaagaacaggaatttaggaatgtctttctgtcccttcgattctggattgactctaggacttgctttgacaaatgtgatgtggtaggaattacacttttctgaggcttctgttctcatcctccaggaatctgagaccaccttgtgatgacagaagatcatgttagcaaagctgagccatccgttccatcagagtcagtccttagccaccacccctgctgcatatagctgtgtgaggtagcccaaagagtaccagaaaaagaactatccagccaagctctgaaatcatgagttataataaaccataagcaactaagtttggagatgtttgttaaacagaaatagattgtaatcatggctccatagtgattcaggaatccctgtaagttgacataagggcagcccactcagaaaagtgccagagccagtcagccatgaagaatcagcactggacagaggcattgtgatctaggaagaccaatgacaaccacacttgctacatgcaattagaatagggtgctgatccatttttcaagtgtcacatgagatgcttcccatgatccttccaaagggggtgattaccatcacacagaaatgtgaagtacatgcagctctgaagtcgtattttcattagaaaaaacacaagactgtgttgttttatatatgtgaacaccataagcaatttgcagagcatttttcagcatttctgactgggattatcctctggttcttctcctaccctctagcacctcccacttccctttaggatcttggccagaacgttagcagagatggtgacaagaagactatagctacctctagaactaaaggaaggcactaggagcacaagactaactggtatgaacaggacacactgggaggtgtggaaagtcccctcagtttggagagttaactactcccagagattggatatggatattttaaaaattcaaagaggacaatacatcatgggatggaaaggaaaggggtctgtggtggaatggctgtggtggctaacagtctgggccatgctttgacatttgctttgacattgagaaaccacccagactgcccaggagcatagcttcatgatcaatggaggcttcatcctccgtatctcctgatcccagagcaaggatgtctggcaaagacccaggagccactatgcttttagcaaggattacattaaagaagagccctaggcattcagcagataattgaaagcagggatacaatattggttatttttctcattactgtggcaaaataccagataaggaaatataagtgaagaagtgtttggtttagttcatgctctgagggggtttagtatatcatggggagaaggcatggaagatgaggtactcaggtacctgatggatggtaggagcttgtaggtgtttatgacatggcactggccaggaagtggaaagagattgttccagaactaggcaattccagttataatccctaagatcttcctccaagcagccctcttcctccagctaggcctgtttctaaaggttccacaactggcccatatagatccagagtttgaaatcaagtgctcaaacacatcaacctgcagggcatcttttacatttgaaccatagcaaatgcatatgctgactctgggatgtgatagcaatgtatctatgcatccctggttcagtaggaaacttcactgaattcagctatcaagaaacatgtaataaatatcactttggtgatatgggcaacacttatagagaatgatacagaatggggaagaatcatggagcaatgatagtaaggactccattgccaccaggcttgaagggacaatgtgggggaactacttactagagctttagaagaaggaagtgcttgagtggcagaggctatggagcttgactttcacggtccctgaaggtgtacactttgccttgaccagggctggcagataccagtgggctaaggggctttggaagagcaaaattctacacatagttcagaggagcactgacatgagttggaagagcagaaaaggatttgtagaagatagttgacgatcccagcacagagtacattttaaagatgatcaatgtgtctttgtgtcttcctctaacacatactcttatctgcaaaccacctcccacatgtcagagaagaagaaagagaggaaaggcaagggctcaggaagggagcctaacttggatgttgttgttgttgttgttatcataaactctttactatttattattataagaaaagaaatacatgctcatttaaaatgcaagtcatctataaaatgtagaaaaatacaaacaacaaaaacaaaaccccataacaatggtcatcctgtcataatcataaaagccaactgcatctgggtgtatctcctaatgattttttccttctatgtgaatgttcaaaggttcatatgtgtctttgtgttatatatctgcatgcttattttcttaattttattgttttaattaatcaattttgtgtgtgtatatatatatgtgtgtgtgtgtgtgtgtgtgtgtgtgtgtgtttgtattgcatgtacatgagtgtttgcatgccaaaggcaaaagaagatgtcttcctctatcactctctgctctattgctttaagacaggatctgtcaatcaactaggaactctgtttcggctgagctgactggacagtgatacacaagtgtatcctgggatacacttgtgtctgaccctcagtgctggggtaacagtgatgcacaaccatgctagactttttatgtgtgtgctgcagatttgactcaggtcctcatgctgcaccataattgctcttactcactgagctaactacagctcttgagaataactttaaaaagtgctggggtaacagtgatgcacaaccatgctaaactttttatgtgcgtgctgcagatttgaactcaggtcctcatgctgcaccataattgctcttattcactgagctaactacagctctcgagaataactttaaaaatttgaacaagttactgtacaacttatatttgtagacatatgtcaaaagtcttgtgtttgtcctattttatcttcataccctttagaaaattaagtaacaaaccatgactgtcattttcatttacaatgctgatatgccaggatgaattcaacaaattggtaaaagtcactgtgaccaaatagctgacaaaaaaaatgcaagggagaaaggggcttattttatccccttgcttggagaaacacagtccatcctggaagagaaagtatggagataatcaaagtggcttcatgatgcagaccaggaagcccagaagaaagtgaatgctaatgttcttctgggctttccttcttttcctttttattcagtcagggacatgaacccatgagacggtgacacagacattcaggaaagaaatcacttcaagatacatccagagatgtgtctcctcgatgatttaaaacacaattgagttgatgagttagccatcacatacatgatggcatgaagggcacatatgaaacatttataggagtagagaaataactttgagagtttctttccaaatgagttttgatcatatagccacctacacattaattattaagtaattcatttattaaatattcatttctagctttgtcaaaattaaggtatataatatgaacagtttatccttagctcttacatttgccatcatgtttttcccttcatcaaatactgtgtgaaaactactgctacccttctctaaatccctggaagaaacagtccctttatcacatatctatacacaaattataatgaacattttgatcataaaattccatgtatacatttgtatgatttcctcagggttcattcttagctcagttacctagtgggaaaggattaacaacattgaaagtcctggtaaatatcaccagctcactccccaggatagttgaggaatatacaatgtcttgcattataaatcaagaaaacattttagtgtctttagtacaggaaggcacttttcaggctaccagaagaaaaacgtttacatcagccttgacataaaacctttggtctacaatcttccctgcctgaaaaatatattaggacaatggtggcacaaaccttgtgggagtaaccaacttctgtctgacttgatttaaagtatgctccacaacccatacctgatactgcatgggtgaccaagaaccagaaactagatagcccagagacctagggtacaaccatatactacttgtctgaaagcaaaaaggaaaccaaaaataaaacaactccaaatgatactatgctatactcatagaccagtgccttactcaaccagcatcagagaagcttccttctgcagcagatgggaacaaatacagagaccgacagccagacattatgcagatagtgagaccttgtaccacagctctaaaagggatgcctccatcaaatccctccccttatatctcaagagaggatatatatatatatatatatatatatatatatatattatatatatataatcacagaagaggaggcagcaagaatggggggggggcagagaggatggaggacaccataagaacaaggccctcttaatcagcagagcaaacaaaggaactcacagagactgaagcagcaagcacagggccaacacagctctgcaccaggtcctctccatgtatatcccagcgttaagcttagtatttttatgggactcctgagtgtgtgaacaagtgtgtctccgtctcaagtcttctcttggggcaatttttctttttgttgatttgccttgtcccactttgatgtgacagtttttgctttagcttattatattttcttttgttgtgttttgttattacctcttagaagtctgtcttttctaatgagagacagaaagggagtagggtccagatggacggggaggtacgggagaactgggaggaatagaaggaggggaaactataatcagaatatattgtataagaatctgtttttaataaaaaaaatctcggagggaaaaagaacatttatgtcttcttcctctgaggcaggaaatgggccaactgttgtcatgtccaattttaaaaataagaagttcaaatgaaaataaataattaagaaaaaaagaaatcaagattacagagatacttactgccacgttcattgccgctctactcacaataactaagaaatgaaaagagcctagatgtcttccaactgataatggataataaaaatgtggtaggcggttacaatgggtttctgatatgggatgtctttctgtacactgcgaatatgtgttgcttttattggttgatgaataaagatcttttgaccaatagtcaggcaaaatatgtctaggtgggaaatccaagcagagatatggagagaaagaaggcagagtcatggagatgtcatgtagtcgctgaaggagtaacatgctggagcatcagcgttaagccacagccttgtggcaatacatagattaaataaaaatgggttaatttatgagagatctagctagtaatatgtctgagccattggctaaaaaattgtaattgtaatttcataagctgatgtggggaacttgaggatgggagagaaacttgttccagtgggaccaggcaagacagagaaaaacatccaactacagatttctattcagatgtaaagaaaaatgaaatcatgactttttttggtaaatgaatagaaccagcaaatactatattgagtgaaataacatagacccacaaagacaaatgtcatatgttctcttttatttgtggatcctagctctgaatcttatgagttgtgtgtgttatctggaataaacatagaatcaataaaaatgggcccaggggtgagggaaagaaggagttttagaggagggaatggtaggatacggatactttgaggtggggaaaagagaaaaacatggagcggtgatgtgaattgaccaaggaggataacacagagggagagggaaaaagaagaaataaataacactaaagaagtttcaaaaatccacaaagaaatatattattttataagcttatttaaaaatatatatgtaactaattcatttctgcaaatattcattttaaaataacacatatattgttatttattactattatttagtgacattatgccccaggggttataatgctctccttcaagagacatagactatctaacaaaagtagtaccaggcaaaggatctttgagttactggtcaggggacctaagagactctcaaactatataggctactgacattgtccttgcttgcttctcagaacttgaagataagaccctgttgctgaagacaccacacactttgaacaaaggatttggaggaaacaagcagaaactggcctgaagctcctccctgaggactagcgctcatattatctgatggtgctttggaagctgccagaggagaaaatcaatcaataatcctatacatccgtaaagcccatgaaccatagcaatgactatcctggcagcatatcctcaagggtgcaataatggcacttatatcctgggggtaaccaaacggttcactaactggccttaaataggaaggaattcgtgtctggtactactactcatgtttggagaggttgcagatcctagaggagaacctactattgccatttcccccaaatcagtgtaggttctcattgtatcataaatacttatccttttacccacagataagtgtagctctgagccctcttcaaaacaagtagatggaagctatcctagaaccccacaactggtcaaagtgcaaagggtaagtgactatggtgagtccaaccccaaagacacatctataatgaagctcctacacctaaggctcaggggacattacagaagagggagctgagagattttaagagctggaggaccaggatacctgctgtgagagagtgtctcctaggcaggacagggaagcagcccccatgaaatctcaagaatgtgtttgcctaaacaagacctgtgtaataactgtgctggctagttttatgtcaatttgacacaaactagaggaattttagagagaactgcagttgagaaaatgctcccaccagattgtcctgtgggaaagcttgtggtccattttcatgagtaatggttgatgaggaaggaccagttcattgtgggaggtaccactctgaggggtggccttggatggtataagagagtaagctgagaaagccatggagagaagtgagccgcacttcacttctgtgtctgtatcagttcctgcatccagtgtgtgtgtgtgtgtgtgtgtgtgtgtgtgtgtgtgtgtgtgtatgtacatatggatttgtagtaattatataagaagagatcataaactcaagagggggtgggaagagatgtgggggaacacagaacacgaagagggagagacagtattggaatttatgtaaacagtattcatttatgaaattctcaaaaaataaataaatggatgcctagctgatatcccttttcaatgttcattggggtggagatattcatttattttgggtctcagtatgatgctgattttaaaaagtggtaatgggatccctcagaaaaggctcagtcagactgagtgttagtctattttgatcagtttatgctttaaaaaattactaagggcactcaagttgctttcatggctggcatcaactgcttgccataggttgagagggtctttatttattattacattttctttattgattttatgtgtatgtgtgcatacacacatgttggttctatgatgcatttgtggaggtcagagagcaagatatggaaatcagttctctccttccaccatatggttccaggttgaactcaggtgtcagacttagaagtaactggcttcgccagcggagccatctcagaagcccttaagaaggggctttgcggtaacaggaaaaaagcaatgaagagaataacccagcaatcataagcattcgcacttcgcttgtactcccagcattttttctatgaatatgcatgcatatgcaaaaatgtgtatgtgttctcatgttctttataggctatttcaaaaataactgaacaatttactttgcaacttatgtttgtgaacatatgtctcacaagtggtgaggctgcaatgaggaggcaggcaggttttgctgagtgtagagagagatggtggtaagagactggccaccagattcccacatttactcttggcttcctctaccagagatggaaataccaaagaggcaggccttacgatatttaacactgtatcagcacttacccaagatatttttggtttttctttttaaattgtagctgaagtgagaaagtgatgaattgttagaggggaaagaatattcttctggggtcaaggctgatgaccctcgcagactgagttatgggtaatgtggagtggaggaaaaggctctctgaatgctgccccaggggctcacaaactgcggcccacagactgcaagctaaagataggtcttatatttttaaatagttgaaaaagataaaagaagaagaatattttgggtttgtgcaacagttttataacattcaaatttcagtgtccataaataaaatagctgggcctttgaatagctgtgatataggctgaatgtcccataagcctaaaatatttacaatctagtcttttatagaaaaagttccattcttgctgtggcagaaaggagcttccatttcatgaacatgcactgtgtacccgtgtcctgtgacacagtggccatgtcatttatccatatgcatgagcttctgaacatgcactgtgtacctgtgtcctgtgacccagtgaccatgtcatttatccatatttgtgaaaacagaggttctaaaaatgtaagttttctgtgcctggtgagactttgggagcccattccacatggagggatgctctctcagcctggacatatgagggagggtctaggccttgccctgaatgatatgagagatgccccagggagagcctcaccctccctggggagccaagggggtatggggtagggggttgggggttgggggggcagggaggaggggagggagagggagctggtattaacatgtgaagcaagcttgtttctaatttaaacgtaaaaaagaccatttaaaaataaaagcaaattcaaattagagagagagagagagagagagagagagagagagagagagagagagagagagagaagaaatggtgggactgagtttcaaagtcagaagtcttactagagaacctgaaaactcatctgtgtgaagagcagtcagtgaacatctttctgcaatgctttttagacttccgtgtcttctctgagtcacacatcatgccaaatctgcttctgatggggaccagcatactgtatagaaaatatcaggtgtggtgcctgttgttgttgacccggatttaataaacactagccaatagtattatgaaaatatgatgactactaatgataaagttttattttgctctatctaggttcacatttagattacaacttctttgattaaattatcatctattaaacacacacaaacacacatacacaccaacacacacacacacacacacacacacacacacacacacacacacacacacacacacacacgattatatctgcaaggtcttacaacaatccttttccatcattttcccctttaaagtgcagagtggtgatatattctctctcctttttgagagagctgttcctttcgatttcactatggctctaatttcttctgactgtggccttttcccctcacttaggagccctctgcctcacttctcagatccatctccatttgtgattatccctgtgcaactcaaagggctttctgtcccaggaacaatggaagctttcttagcatcaggtttggcatggctatgctccagcatgagggacaatttaatgacaccattaagttttgacatttaggtgtcttttatgagctgtctagccttgcaaactgtttactgtaatcagagactctcaaaagtggaaggcacgatataaatcatttatgacagcctcgtgactattgttagaagctcatctggtccactcttgacaggtaccccggatcatccagatatgtctagccaggtgactcacttttctcctgaagcaacatcctctctatgagaaagccatgcatcctaaagatcttgcttattctgaggtcattctgttataacttttaaaagatagttatcatataaaataatgggcttcattatgatatgttcgtgaatattttgttcatatttgttccccagtgcccccattccccttgtgcttgtctgtttcctcctaccagatacttcccttctgttttcatgtgataaacacatgtaaatatatttaaatttattacatttatatgtatgtaagcatatatatttaaatctaggttacacgtgagagaaaacctgtgatattttgtcttccttccatatcctaagcccccttctactttcttgtcttgtgatatttatatttcttagtctgggctacttcacgtatcacaataatttctttttttctctccattttttatttaaattagaaacaagattattttacatgtcaatccgagttctctctgcctccccttctcctctgccctcccccccaactaaccctctacctatcccataccctttctgctccccagggagggtgaggccttccttagggggtcttcagagtctgtcatatcctttaggatagggcctaggcccacccctttatgtctaggctcagagagtatccctctatgtggaatgggctcccaaagtcttttcctatgctagggataagtattgatctactacaaaaggccctatagatttctgaggtctcctcactgacacccatgttcatggggtctggatcagtcccatgctggtttcccagctatcagtctgggaactaagagttcccccttgttcaggtcagctgtttctgtgggtttcaccagcctggtctggacccctttgctctttactcatccttctctgcatctggattccatttcagttcagtgtttagctgtgggtgtctgcttctatttccaccagctgctgaatgaaggctatagggtggcatataagtcagtcatcaatctcattatcaggggagggcatttaaggtagcttctcctctgttgcttagattgttagttggtgtcatcattgtagatctacagacatttccttagcacctgatttcatttttttttaacctataatggctccctctattatagtagctcttatcttgctctcctctattcttcccccaactcaaacttcctgctccctcatgtcctcctcacccctcctcttctccccttctcattctcctagctccctctcccctccctcatgctcccaatttgctcagaagttcttgtccctttccctttctccgggggaccctctatgtctctctgagagtcctccttattgcctagcttctctggcggtatagattgtggactggtaatcctttgctctatgtctaaagtccatatatgagtgagtacataccctgtttgtctttttgtaactgggttacctctcacagaatggtttcttctagttccatccatttgcctgcgaatttcaagattccattgtctgtctctcccccctccactgtgtcaaagtaccacattttctctatccattcttcagctgaggggcatctaggttgtttccaggttctggatattacaaataatgctgctatgaacatagttgaacagatgtccttgttgtatgaatgttcttctttaccacaataatttctaatttcatccattttcctacaaatgtcatgattacatttttctttatgacttaataaaattccattgcacatgcactattttcttctctatccatgcatctgtcagtgggcatttaggctggttctgtatctcgactatgggggcaataattgtgggtggtgggtgtggaggcatctctgtggcgtggggacttagatcggtgcagccaggtagttctattttaataccttgagggatctccgcattgatttccaaagtctctgcataagtctccttcatcccaggaagctgattctgagggctaagagctgatctcaacacttgacagtaacttgggagtctgttagtccccagcaagtggacattagcaagtggatggaccttaggagccacctgtcatgaggttcactgctgcacacagaactctcaggctctagtggacaacttgaccgccacagtctcatcttttcagccaggttcttggtgctcggtggcctgtgaaaatacagagacagatcacctgcactggttcagtcctgtggttgctttccatattcccaatacactggagagacacccccagctaagatactcagggctaacaatggggagttttgcatgttatataatgattagcgtaagagatgaaagacatcaaaatataaatcaaaatgaaactctgggtcaggcagacggcttttctggtaaaggtgtctgtcacccagtctggtgccttgagtttgagtccccaagacccacatggagaaggagagaaaaccaaccgaacgcctcacccatgccatggtatgtacatgccttatgcctccctccccccccccccccgccaagaggtaaacaatacaatttaaagaagaaacagacagtgtaatggttaaacagacagaaatctatgaaacagaattctgcaatactttcatgactaatcagaagaggaactaagtctagaagtaaatttgaacagcagttcctaacagaacacacttgagaatttaaagactttcataaatggtcagatactaattcaattactcatgacttcaggctttaaatgtagcatagatggtgttcatccattcttagttacagggtaattttctgctggtagtaagttttaaactctctcttgggcacctttctagcttcctggcatttccatttcatcgctcccttgtagatatgcttctataaaaattacaagctaagaaagagaacatgtgactcttgtcttactgaggcagttgccttctttgatttattattttccaattccattcactttttatatctgaaaaacatttcattaggtaaaagcaccacattttcctttttcactcaccaatgacggaatctaggttggttccatttccttgctatggaaataataaagcaataatcgtgggtgggcaagtcctgcagttggacatagagtcctgcaggtgtgttcccagaaatcgtatagctgggtcatgtgaaagtgctgtttttagccttttgagaaatcttcacactcatttctatagtggctgcaccaatttacactaccaccaatagtaaacaaatgttcttgctcaccccccataccctacctagtgtttgtttcttgatgttagcttttctcactgaggtggaatgttatagtaattttaatttgcatttgcctgatgactatacatactaaacactttaaaaatatttactggccatttgcatttcgtcctttaagaactttctgtgttcagctccttagtgctcttttaaaattttaattttttttgtgtttttgttttgtttttcaagacagggtttctctatgcagctttggagcctgtccaggaactaggtcttatagaccaggctggtctcgaactcacagagatctgcctgcctctgcctcctgagttctgggattaaaggcgtgcaccactactgcggctccttagcccatttttaattgtgtactgtttgttttctcttttgagctctttgtatggtctagatactaaacctatgatagataggtggctagcaaagatttctcccattctgtaggctgtctctcccattctgtaggctgtctcttcacttgttaactgtttccttcttttaatttcatgaggttccatttgtcagtcatttgccttatttcctgagcaactggagtcctgttcaaagaattcttattatatataaatcttgatgtttccatcccccccgccccggttctcccccagaatctcagtctccttactggatttcatgttggttctcttacgttcgcaatagtttcattcctttattcatctgttttgtttcctcattgacagcattgatggtatttagaagtagactctaaaattgtttgcccagaacttcaaccatttcagttttactggatttggcagttgtggacttacaatcccccttttttatgtttcttttgctttggtggtgtgatatacatatttggtcatagcttctacttttatttgaggatattcttagtgagcaccatactcttgagagctcagtctctagtatctctaagagaggagacaataaactgctacaaagcaacaactcaaacccaaacaagatctagagaaacatggtgtgacaatgaacctcctttccctgttgacctatcatcattctagaagaatcagtgtcccaccaaaacctgtgactgggtttgtgactcacagggacagtgagtgtttctccagtctctctcctggcttactcttttggtgaggatccccacaacctcccgctaaacaactccgccacttgtgctccgtgttgctccctacttctctcagttcacttctgcctttccgagctttcttctttgtggtttctaatacccttctttttttttttttggttcaaagctgcttggccaatgactaggattcctcatctgctagctcagtctttactatcataaacctatatattttataagacttattggacgccttattggtgtccctccttgctggtggatcacattgtgctgctggagcaggagcggaggggaaaagagggaccttcctgtttctccttcgcttaaatatgagtctccttgctatgtcacttcctgcctggatcagcacttctctactacatttcccagaatcctctttgactcctagccctgtccaatttcctgtctcattggccaaacagtattttatttaacaatcaataagataaacatacacagtatattccccatcctctcctcttttctgtctaaataaataggataacttatcttttataataactgaagaaaactataaccataactatctgtcttcaactctatcaaagaccacagaaggataatatataaactctagaattgacagacatccactacctggacagtcacccaaagttcctctgtaacgttggggcatccatcttcagcccataggccacagtgtgtctggcacgcttctccatttcaacaggaaccctttaatactgtcttgttctataagtttagcagtcactttcttgtgggtcttgcatgtccagtttatacagcaacaaacagtccaggcaagagcagtttcttgcccaaatggctactcttgccatgttgaaagcaaactccataacaagtttcttcgatgcccatcctcctttctgacgtaattggtgtgccaggagcaggtgtgtctcactgccaagaaaaaccctaaaccatttaaataccgtatttctgtaggtctttgaaaggtttgaagaatacctaaccatctcaaatacttctctgtaaatctagaaaacctaactaacctaattataagttctgactattataggtaactatataacctgtatttaattatgtatatcattttaaaagatctgtataaacacaatacctaaacaagaggagacatatacctatcacaaaattgaccttaaagttgtatcaataaatgaaaatctataccaatgcaaagtattcattcctatatcctattccccttttctttctttaataagagattgactatgttcattatcattataactaaccccatttaaatgaaaacaaacatttataaacaatatttgggaataagggtgtcgttctttctaaaactgcttcctgctgattggggatgatgttcatataccatagggatcatgataaaacatagaaacctgaccaagtccttgtttttgtagtctgtaaggctatatcatctcagcttcagggggtcttgcttgatcaaaccatattagtctggaaggaatccacagcttttcattttctcttgtttttacatcaactggactggacattgagtttttgggggaaaccgtctgatgtgtagaggctccccaatctgagggtctttcatcatctattataatatatatggggaacaacttgaaactcacagaggttaaacactctagccaaggtcacacagcactgtaagttcatactttgagtctccagtgggactggacagataagggatcttttgttctctctgctgggatgttttaaagcaattttcctagttcagggaaagtaggcccgcaacccttttcccatcggttttgtggcttgcttgaggcatcctcattcttccacttgttttgttgaggctaggaagccccagctgtgtctggttgattgagactaatacccttctgcatgtcttcagaatagtgtctgtgtaatctgacttctcattcaccctttaaacagaggcggtttccaatcaccgtctactctcttacatgtgctccaaggtctcagggtccaagcaaaagaaacctgttaccactttcatggggctgttctcacatttgtgggttgttgttaagtctccctaaaacctcccttatgtcacttcatgtggatgctgctgctcaattctcattgcagcccagtggctgtttttggatgacattaattacgttatcatgagagcttaaaatatgcctgaactagtgatatacagacggcagctggcatgatctatcaagtactaaacactacggagttagactcatgcttggtggccttgcaggttggaagaaaaagaaagttaaaacagagctttcgggtatagtgtatcccctaacactaccgaaagatgcatctccaacacaaatccatgaaaaattgaatgtctttttaaaattaaacacaacgactttgaaagttagatggagaacaccctaatttaagagccagtgaaatgcagaatccagtcagactgtcgaactgttaggtgttatctacaccatgaaaagaataaaagctggatgattcataaaactcgagttcaggagggtgactgacacttcccctgtcctcccccgtcacactgcacaagcactctgactttgtcgcatcacaaaaacatgtttcaggcattcaaaggagagggtatacagagctccccacttacatatgtgatcattatgtaatctagttctgtaaaggccattcccacattgtctatgagaaggtaattccccacagtgtgcagggatataaaatctgaaaacactagtacttttgtattgaaaagtttgtacatggtgactactttacatatatgaattaactagaaattttgagtggccacagttaaaacatataattgagacctggacccagacttatgaattaaatgaaaatcttactaaatgtttattcagtatcaggacattaaagaccatttgaaatatgtatgtatgtatgtatgtatgtatatatgagagtgggaagttttatcttttactaactcataaataaaagacttgtaaaaataggacattgttaaatttataagcatggtttaaatttataaacagagtgaagtgttattccaaaacccctttaaatagggatgaggcagagatatagaaagaagagagggatggagggagaattaaccaaaactgaggattcatgaaggaaaaaacagacagaaacctattattttataaactaaaaatataatttataaaaatacataaagtaaaagggtttgaatggatgattttgactattgatgagtatcaactctgcatataagttgataatgctgctccagaagccaaggtttattaagcaaaatctcaaggctctatgtgagatacatccttatgagttgttcgtcagtgggacctgagatgttccccaaacaacatatctattgctgttgttctttgttactcactggaagtagacaatgagacttcattgctcaagacaatatacacattggttacaggatataaagaaatcaagctggagttctgaactgggagcatcttccctgctggctagcattctaatgttacgataaatatttctgccaaaagcccctgagccccaccgccatgtgtaagctttttgccagctgcctgcctgagttagggcccaaatgaatacacagaaacttgtattaggtacaatgttgcttggccaatgactaggattctcatctgttagctcagtctcaattatcatacatctctatattttataagacttatcttatccgacaccttattggcctccctccttgctggtggctcacatcctgccgctggaggaggcgaacggggaaaaagggatgcttcctgtttctccttcacttaaatatgagtctccttgctatgtcacttcctgcctggatcacacttctctactacatttcccagaatcctctttgactcctagtcccatctacttgctgtctcattggccaaacagtattttatttaacaatcaataagataaacatacacagaagtacttaccccatcattctaatgctagaagctgctgtgcagatgttggggacaaaagtcatcaatggtcttccccatctgtcaacactgtatgcttcaatgccaaccttccaggtaggaaatgcccactggctaatggtggcatgactgttatgggggcaactaatggagttctgattgtcatctggccctgtaggaagaaattcattgcctggtgttgtaaacctgttaaaaagtccatagttgagaatggcacaggctctaggggagaatgtactacaactggtttgcaaaaatgagcttgttgtcagaatagtttctaaattcttatgttcatgtccatagactggtgctattctcagccttggttagagaaggttggtttcacaatgggcagtggttaatacagggaccgtatctggtcaaaaatgctaagaataagagactgttgagtgctcagccctaaataggatctctgtatcaccccacccaagatccagggaacatcacagaaaagggatggaaaccatgtgagagtcaaagatggggaggcatagtgcaaagtgctcttttctatatatgaaatggctgttgtgatcatggacacatagtagctgtggttattgtgtaagacagaatccatcaacattccatcatgcattcaggaggggatcaggaggcctccctcctccccgaggagctattgacagttgttgggttgccaggggaggggcaatcattttccccagtggtacagccactggtatgttgttcaaactctagaaatagtcctctgtccatgctcatgcaagcaaccttaattactgcgtcctacatacacccacacacccacacacacccacacacacacccacacacacccacccacccacacacacacacacacacacacacacacacgggggagggcagtgaggccccttttgctaaaggggcctcaacaggaggtgggaagacaagaaagagcaccagagctgactgacagaaccacatcgtatacacatatgaaattgacaaaaaaatttttacatggtgtacatgtaagaaattctaaaaaaattaagtgattgttgaatatgctaggattgaatatgtttagcttttaattgaaaatgtttagctttcagaactaaattttataactatgtgcttttaagcattttatattaagatttaaaacaaaacaccccagcctttttgacaatcacttcaagtataccccaaacccttcagcctgaagaacaatgcccctggttttgtcagttgcctcctatttaggatagttatccagcatgaaaacctttcactcgtatggcatttataatcagttgctcactaatttatcttgttttgtttcatatgcattactgtcagttttggattacacactccagaacttgtgcagttagtatttgggacatgaaaacagaactttgagtttacccctgtcaaatgacatcacattgacttcgaatcattgtatttctcaccccaatcaaaggttggctatctctgatatatatatatatattatatatatatatatttagttcaaattaggaacaagcttgcttcacatgtcaatcccttctccctctcccttccttccccccaatcctccaccagccgcccaccccctcccccctctgctcctcatggagggtaggttcctccacaggggctccccaaaatccacaacatcatcctgggcctggcctaggccctcccccatgtgtccaggccaaaagagcatcccttcatgtgggatgggctctcaaagacccgtcttacaccagggaaaaatactgatccactaccatggaccccaaagtgttttgaggcctcctcgttgatatccacattcaggggtctggatcagtcccgtgctggcctcccagatagcagtctggggtccatgtgctcccccttgttcaggccagctgtttctgtgggattcagcatcctggtccctaccccttagatcttcatttctccctctttgcaattgggtaccagagttcagttcagtgtatgtctgtgggtgtctgcctctgcttccatcagccactggatgagggttctaggatgacataaaaagtagtcatcagtctcattataggggaagggcatttagggtagcctctccaccattgcctagattgtcagttcgtgtcatccttgtagatctctggaattctccctagtgccagatctctcctcgaacctatcatgggctctcactgttacggtatctctcatcctgctcgcctctattcttcccacaactcaacctttctgctcctccacttcctcccctcccctcttcttctcctcctctcattctggagctccctttcccctaccctcatgctcccaattagctcaggagatcctgcaacttcccattctctggggtccctgcatttttctcatagagtccataatgtttcctagttcctttggtgaagaggattataggctggtaatcctttactctatgtctaaaattcatatatgagtgagtacataccatgtttgtctttttgtgactgggttacctcactcaggatggtttcttctagtttcatccagcctgtgaatttcaagattccattgcttttttctgctgagtaatactccattgtggaaatgtaccacattttctctatccattcttcagttgaggggcatctaggctgcttccagtttctggctattacaaacaatgctgctatgaacacagttgaacatatgtccttgttgtatggaagtgcactatttgggtatatgcccaagagaggaattgctggatcatgaggtagactgattcccattttcctgagaaatcaccatactgatttccaaagtggtcttacaagtttgcactcccaccagcaatggaggagtgttcctttttctccacatcctctccagcatagattgtcattggtgtttttgattttagccattctggccagtgtaagatggtatctcagagttgtgttgagttgcgtttctctgatggctaaggagtttgagcactttcttaagtgtctttcagccattttagattcctctgttgagaattctctatttagttctgcaccccactttttaatttcattgattggtgttttggtggctagcttcttgagttcattgtatattttggaaatcagctctctgtcagatgtggggttggtgaagatcttttcccattctgtgggctgtaattttgtcttactgacagaagcctttaccttacacaagcttctcagtttcaggaggtctcatttattaattgtagatctcaatgtctgtgctactagtgttatgttcaggaagccgtctcctgtaccaatacattcaagggtaactcccactttctcttctagaagattcagtgtggctggatttatgttgagacttttgatccatttacacttcagttttgtgcatggtgacagatatggatctatctgcagtcctctgcatgcccgaatccaattgtgccagcaccatttgttgaagatgctatcttttttccattgtatagttttagcttctttgtcaaaaatcaggtgttcataggtgtgtgggttaatatcagggttttcaattcgattctattggtctatctgcctatttttgtgccaataccaagctgttttcaggactatagctctgtaataaagcttgaagtcagggaaggtgatgcctccagaggttcctttattatacagagttgttttggctatcctgggtttttttgttttttcatataagttgagtattattctttccaggtctgtgaaaaactttgttgggatttttatggggattttgttgaatctatagattggtcttggcaagattgccatttttactatgttgattctacctatccaagagcatgggagatctttccattttctggtatcttctttaatttctttctttaaagactcaaagttcttactgtacgggtctttcacttttttttagttagcattaccccaagatattttatgttgcttgtggatattgtgaagggtgaagtttctatgatttttctcagtctgtttatcatctgtatatagtagggctactgatttttttgagttaattttgtatcctgcttctttgctgaaggtgtttatcagctgtaggagttccctggtagagtttttcaggtcacttatgtagactatcatatcatctgcaaatagtgaaagtttgacttcttcctttccaatttgtatacctttgatctccttttcttgtcttattgctctagttagaacttcaaggacaatagtggagagatagggagagagtggacagccttgtcttgttcctgattttagaggaatcactttgagtttttctccatttagtttgatgttggctgtaggtttgctgtatatttcttttatcatatttagatatgttcctgttattcctgttctctccaaggtctttatcatgaaggaatgttggattttgtcaaaggctttttcagcatctagtgagatgatcatgtggtttttctttttcagtttgtttatatggtgggttacattgatggatttttgtatgttgaaccatccttgcatccctgggatgaagcctacttgatcatggtggatgatttttctgatgtgttcttggatttgatttgccaatgttttgttgagtatttttgcattgatgttcatgagggatattggtctgtagttctcttttttgttgtatctttgtgtggcttgggtatcaaagtaattgtagcctcataaaaagagtttggcaatataccttctgcttctattgtgtggaacaatttgaggagtactggtattagctcttgtttgaatttctggtagaattctgtagtgaagccatctggccctgagctttttttggttggtagacttttgatgactgcttctatttccttagaggttataggtctaagttgcttatctgttcttggtttaattttggtaagtgatatctatccagaaaattgtccatttcctttagattttcaaattttgtggagtacaagttttcaaagtatgacctgatgattctctggatttcctcagtgtcctttgttatatcccccctttcatttctgattttgttaattagcatgctctctctgccttttggttaatttggatagaagtttgtctttcttgttgatcttcttaaagaaccaactctttgtttcattgattctttgtaatgttttcctagttttactttattaatttcagccctcagatcctgcggtgatgggggccttaggcaggagtagggcaggagcagagggtacactcacctcaggagaggtcgggcctggggagggggaaggaagaatgaggtatttccagactcaaggaggtctcccagtctgaggagctcactctgcaggccagctatctctgttttttttcttcttttgcacaaaactgactttccatattatctcccccttgcaattgtgtgtgggtaaaatagtaaaatttccctctgtaatttgtgacttcagccctgacttctctgactccttactgccagtaacaggcaggctctatcacactcatgggttgcccctagttgtataatagcatgcgctgacttaactgtctcttcaaagctgttagctctaggaggactagagcctagatttacttgttcttcagcagctagcaaaggtccaaagaatgaccagtaggcatttgtccaaagaaaaagttcttcggtagcatcattgcacatagtttccttgccaccttttcaattatacagatctaaccaaaatttcaagcttgtctgagacatctctctagcaacagcagctggagtaggagtaggagtcgtagtagcattttttgtactaaattgtgtataaatgttcatttactccttacagggtccttatgagagaggcattacaagctgagcatccctaatcacaaaactttaaatgctccaaaatctgaagctctctgagctatgacctgagcaagtgggaactcatggaccccagtctgacagatggggaaccaacatagggccaaaccaggccccctgaacttgggtgttagttaggagcactggacaatctatggggcctctgtcagtggaaccaggatgtatccctagtgcatgaacggacttcaggagcccatttcccatgaagggttactctcttagcctagatacacagggcagggcctaggccctgttccaaatgacttgacaaatttaatgatccctcatggaaggccttgccttccatggggagtggatgggggatgggatggaggggtccttggggggtatgggaggatgcgactgggattgatatgtaaaataagattgtttctaatttaaataaaatttatataaagaagaaatagaaattaaacaccttccccgtgtgatgggttcaagtaagatcgtaggctctcttaaaataatttataaaattacccaattactgtgtgtataaattgcatatgacatgtgaatggatttttgtgtttagatgtctcatctccaagatatttcattaatggaaaatgtaccaatctcccccatcccaattccaggttccatagtttctgttaatgtatgcttgacctatttcctatgttactatttccatttggacaagggatagatgagtgagactcccagactcatgccattgttgattccagacagcatatcctgggctctaaatactgactcactggctccagagccagctcatcataaaaggcccaaactgaagctcaactgtatacaggatctaattgacaagaacagcaagtatggtatagtctagcagccgcctttgtgtctttagaggaatgggaaaatttctcaagggattgtatttgcagcgacttagcacctagatctttaatttatgtatcatcactgcaaagattgatgattttagaccattttagaggagacatttctatgtgagtatctctggaaataaaggagcctgaaagtataatgaaagggtcatgtatgtatgacttcaaactagttaatgattggtttgagagagtcaagcttttaactcaaggaaaataaaatttaaatttagggttgataaggaaagggtaagttttaacaaataggaatggagagggaatttcagttgggaggacagtactttaaaaagtttagagtaggaactttttattagtgacctatagatttttctggcatagttctggtctcagtgagaaaatgggttgtttcaataacagctaagggatttcaaacctgtccttgaggaggcataacactgcagtaaatttctaaacaaaagactccccagtgcttttatactgggagagagagggacagagagtgtgttccctgaaagagaattgtggaagaacctatagcagtaatttaagagtgacataaaagtctcttgattcaatagatgctacagaattggacaaagaaagatctggtctgaaacaggttgttgaggaaataatcaacaggactttgcaataagtacagaaggacgatcagaagtggcccctgaattctgagctgggtgactttggaaaaaggagctggtaggaaggcgacactccacttcttcaacacagccagcaagtatttattgggaaaacactctgtgccaattgctgagctagacaatgactacacaggagggaacaaagcagactttgttgtcactcttcattgattcagcaaacaggaaagaatgagtaagacaagcgtccagatttcagatgcttgctgtcaaggaaacaaatatatagatgattaggaaaagcaaaaggaaggtgtcttagtagaagttctatatctgtgaagagataccatggcctaggcaactcttacaaaagaaagcatttatttgggggcttgcttacagtttcagaggtttagcccacattaatcatggtggagagcattgtggcatacacagtgctggagcagaagctgagagctgttttgtagagagagaggggagggagggcaagggagagggagagggagagacagaaagagagacagggagagatggaaagagagactgggcctagcatgggctttagaatcttcaaagtccaccacagtggcacacttccaacaaggccacatctcctaatccttctaattctttcaaatagtgccactccttggtgactaagtatttaaatatatgagttgatggggggcattcttttttaaataaagtaaaatataataagataaaagaaaaactaacacaatggaatgggataaaacaaacaaacaaaaagaagtaaaagaacctaagacccactcatttgcacactcaggaatcccataaaacacactaaactggaagccataatatatacttcaaaggacttggagggtaaaaagagaaaatacaaaaatatataaataagatagtaagatagatttttaaagaagaaagagaaaaaacaaaaaatacacacacacacacacacacacacacacacacacacacacacacacacacacacaacgggaaaactctggtaggacattataagacaaggcctctccaaagatgctgttgagtttgttttctgttgcccatctactgcaacctacccttaagagtagtttgtgtcccaagtgaaactcccttgaaggaaactaagttttcatttgtaagtggttatcaatcagaaataaagtctgtgttagtgatgtgggcatgtgtccacttctccttttaactacagggctctgtctggtccagacctatgtaggccctgtgcatgctgcctcagcctgtgagttcatatgggtgttagtcctgttgatttagagggccttgtttctttagcattctccatcccctttgtcttggatactctttccacttcctcttcctcagggtttcctgagccttgagggaagggatttgatggggtcataccttttagggaagtattcttacgtctctcagtctctggataatatctggctgtgggtttctgtatttgttttcactatttaaagagtaagcgtctctgatgatggctcagcaagccctgatttgaatatagcagggtatcattaagactcattttattgtaattatcatattttagaacagtggtatttgttccctgggctgtctagtttcaggttcttggtcacccaagcaatggcagctatgggttccatattgtggagtgggccttcagtcaaattagagatttgttggttactctgacatgctttgtgctaccattactctagcatatcctgcaagctggacacgactgtagagaaaagggttggtgtaacacgaaaaataaatggatctggagactgatactggagttcaaacttcaagctgaatatcagaaaagcaaagcaactggccactagctttttacctctaccttaggctgaatgggctgattctgtctccacaagctctcacgaagtctcagactgtaactctcctcagcgtggctggagaatgaatgcctctactgagaccttgcttctgtcttatatacttccctaatgttgggattaaaggtgggagctgtaattctcttttagattgattttttcttgtgtagatctgggtagccttggactcatagagacccatctatctcttaatcctgagtcctaggatgaaaggtgtgtgccaccatctcctagcttctggctgttgggattaaaggtgtgtgcctggcttcttttttttttttccagatttttttatttgaattagaaacaagattcttttatatgacaatcccagttcctgtcctcccctaccacaccccccaactaaaaccctacctatcacatattgctccccctggtggagcatagggtgtcatcagaatctatcatatcctttgggatggggcctgggcccatccccgtgtgtcttggctcagggagtattcctctatgtggaatgggcttccaaagtccacacctatgctagggataagtactgaactactataggaggtcctgcagatttccgaggtttcctcaatgaaatccatgtttctagggtctggatcagtcccatgcaggtattccagctatcagtctggggagcaaaatttcccccgatgctcaggtcagttgtttctgtgggtttcaccagcctagtctggacccctttgctcttcactaatccttctctgcatctggattccagttcagttcagtgattagctgtggatgtcggcttctacttccatcagctgctggatgagggctatcgggtggcatataagtcagtcatcaatctcattatcaggggagggcatttaaggtagcctctcctctgttgcttagattgttagctggtatcatctttgtagatctccagacatttccctagtgcctgatttctctgtaaacctaaaatgtctccctctattatggtatctccattcttgttatcttctattcttcccctgactcaacctttctgctccctcatgacctctgcatccttcctcttcttcccttctcattctcgtagctccctcccccctcttcccgtgctctcaatttgctcaggggatcttgaccctttccccttctccaggggaccatgtttgtttcttttagggtcctccttgtttactagcttctctgtgtgtgcctggcttctaaggcttgtggctgacttcgctttctgaatcttcagtcaagctttaataaatcataaataatatatcactgatgggggaggtccttctgtttatgtttatcttattggttgctgaataaagtactgttggccaataggaaagcaagataggtgagactaggagtcaaggaggattctgggaaatgtagtaaaaaattcttatgaaaaaaaagaagtattgagatacaggcaggaagtgacaggcagacttgtatataagcagggacaagcaggaagtcattctcttgctcttcctcttcttcctgctctctgctctggagccgccatgtgatcccgggaagaggaggccaacgtaaggcatcctcgataagataagtcttataaatatatagatttatgataattaagactgagctagcatataagaaatcctagtcaattggccagcagcattgtaaactaatataagactctgtgttattctggtcacccacgtggcagcagggttcgggtagatggagtaaagacttattgttacatatcactacaggtttgtggctggtttctcctttgatagggtgcagaatatcttcatgtaccaaagtagctagcccatagctctatgtaggcaccacctcaacttctgcatgtccaatgggttgtataggtactgtcttcaacaatggggccttgcctttggtttgtggagagcaacctatagttttgtcaacagcttgggttgtttagggatctctataggacccctttggtcaacaactcaattagatgtagccaatcctggttactggaagcttcatttggtgacaagagatggccagttggggctctgtctccccatatatacatatattacatatatgtataagattctgctgtatcatatttacatacaacccctcaagtagcccttaattatagctctttccctatagtccctccctcattcccctcttccatcccctccctacttgaccctcccattccaccccccacacacacacatacactgcatacatccatgcctgtctattcgggttccctttcctagagacatctatttgtcccatccaggttctttactctatgcttaacctctgtgattctacaaactggagcttggtcatcattgatttaactgctaatatacacatataagagaatacacatcatatttgtctttcttggtctgggttatctcactcaggttgatatttttctggttctatccatttgtctgtgaatttcatgttttaaaatgactgagtaatagtacattgtgtaaatttgtacattatctttatccactcatctgttgagggacatctgggttgtttccaatttctagctattatgaactgtgttcgtcaataaacacagttgagcaagtgtctctgtgatagaatgaagtagcctttgggtatatgccaaagagcagtacagctggatcatgaggtagatcaatttccatctttctgaggagcctccttattgctttacatggtggctataccagtttgtactcccaccagcaatggaggagtgttcctcttactccacatctttgcctgcatgagctgtctcttatttttattgactttaaccattctgacaggtgtaagatgaaatctcaaagtagttttgatttgcatttccccaaaaactaagaatgttgaacatttctttagttgtttttcggacatttgagtttcatcttttgaatattctctgtttatatctacatccaaattttaaattgggttttaatttaatttatcatcttgacatttagtttaagatgtgttatgttcatttttgctgtggaatatttatttaatggtgcaaagacctgttgcattcttttatgttgtgtttgtgcaactctgtaaatctgtgtttgcctgtctaaaaaattggtctaataaagagctgaatagccaatagctaggtgggagagagaaataggcagggctggcaggcagagagaataagtaagagaaaagaagaaaagagagaagaagaagagtaaggagaaaggagtagagcagggtgccagggccagccaccccgccacataaccagccatggcataagaaggaaagagaggtatatagaatagagaatggcaaaagcccaaaggcaaaaggtagttggggtaatgtagaaaagctggctagaaacaagtcaagctaaggccaggtattcataagtaagaataagtctctatgtatttatttgggagctgggtggcagactccccaagtaggaaaaaaaaacctacatttgagttcttaatgtattttagatattagctctgtattgaatgtatagttggtaaaaatcttttcccattctgtagctgctgctttgtctgaatgatggcatcacatgccgtataggttttcagtttcatgaagtcccatttattaattgttgatctgaatacctgtgctaacaacgttctgttcagaaagttgtctcccgtgccaatgagtccaaagctataccccactttctcttcaattggttttgtgtgaggtctaatccatttagagttgattcttgtgaagtctggtactatggatctatttgcatacttctacatgcagccattcagtcagaccagcaccattttttgaagatgctatcttttttccagtgtgtatttctggcttctttataaaaaatcaggtgtctatagctgtgtgattttatgtctggatcttccacttagttgatcagcatgtctgtttttgtaataccatgctgtttttattactgtagctccatagtacaatttgaggtcagagatggtggtatctccagcagatcctgtattttccaggacatttttaactgctctgaattgtttatgattctgtcttatctgaaaaataaccttttaagatcagtgaagaattgtgttggaattttgatggggattgcattgaatctataaattgcttttggtaagatggccatttttactgttaatcctgttgatccatgagcatgggatatcttttcatttttgaaatcttgttcaatttctttcttcagtatcttaaagtttttatcacacaagttatcacacttggttagagttacaccaagatattttgtattattcgaggctcttgtgaaaggtgttttttctgattcctttctcattcaatttttcatttgaatatagaagggctattgattctggggagttaattttgtatccagctactttgttcaaagtgtttgtcagttgtaggagttttccagtgaaatatttagggtcacttatgtatactatcttatcatctgcttgtgaagataactttgatttcttcctttacaatttgtatcctcttgttctcctccagttgtcttattgctttatttaaaacttattatattgaataggtgtggagcgtgtggacaccattgtcttattccttattttagtggaattgctctgagtttctttccatttaagttgatttggctatgggcttgcagtaaactacctttgttatgttgacatctgtccattatatctctaatctcttcaggacttttaccatgaagggatatttaattttgtcaaagcgcttttctacatctaatgagatgatcatgtgatttttttgtctttcagtctatttatatggtggattacattgacctattttcatatgttgaaccatccctgcttctctggaatgaagcctacttgataacagtgattgatttgtgtgtgtgtgtgtgtgtgtgtgtgtgtgtgtgtgtgtgtgtgtgtgtgtgttttcttggatttggtttgccagtcttttattgagaatgtttgaatctgtgttcataaaaaaaattgatctgcaattctctttctttgttgggtctttatgtatcaggtaactgtggccttgtaaaatgaactgagcaatgttcattctcttttatagaacgatttgaggagtattagcattagctagctcttctttgaaagcctggtatattttggaaatcagtcctctgtcagatgtgggattggtgaagatcttttccaattctgtgggctgccatttcgtcttgttgactgtgtcctttgccttacagaagcttctcaatttcaggaggtcccatttattaattgtcatctcagtgtctatgctagtaatgttatgttcatgaagtgatctcttgtaccaattcttcaagggtacctcccactttctcttctaagaggttcaatgtggctggatttatgttgaggagaacacaagaagctagtcaccaaagcaataaacaattcaattaaaaaatggggttcagaactaaatagagaattctcaacagaggaatctaaaatggctgaaagacacttaagaaagtgctcaacatccttagctatcagggaaatgcaaatcaaaacaactctgagatatcatcttacactggccagaatgtctaaaatcaaaaacaccaatagcagtctatgctggagaggatgtggagaaaaaggaacactcctctattgctggtggtagtgcaaacttgtgcggccactttggaaatcagtatgacagtttctcaggaaaatgggaatcattctacctcatgatccagcaattccactcttgggcatatacccaaaggatgcacattcatacaacaaggacacatgttcatcaatgttcatagcagcattgtttgtaatagccagaacctggaagcaacctagatgcccctcaattgaagaatagatggagaaaatgtggtacatttacacaatggagtattactcagtgggggaggggtggacgagataatgaaatcttgaaattcaaaggcaaatgaatggaactggaagaaaccatcctgagtcaggtaacccagtcacagaaagacaaacatgaaccttcatccagtagctgatggaagcagaagcaggcacccacagctaagcactgagccatactcttggaatccagaggcagagagggaggagggatgagcaaaggagtcaagaccaggctggggaaacctacagaaccagctgacctgacctagtaagagcacacaggtcccagtcgtaaagctggggagccagcattggactgaaccaagccctctgaatgttggtgacagttaagaggcctggacagtctatggactctaacagtggaaccagtatttatccctaatgcatgaatggactttgggagcacattccctatgaagagatactaactattgcagtccagacacagcaacgagggcctaggccctctcccaaatgatgtgacagactttgatgatcccccatgaaaggtctcaccttccttggggggtgggtgaagggtgggttgggggattggtagggggcataggaggatgggagggagaggaaactggggggtaatgatatgtaaaacaattgtttctaataaataaaaaaaaagaagaagaaagaaagtctgatagaatcctgtgctaaaaccacctggccctgagcttttttggtgaggcttaataaatgcttctttttcactaggggatgtaggtatgtttaaatttcttacctgctcctgatttaactttggtaagtggtatgtatcaagaaaattttccatttcttttggatcttctaatttggtagagtacaggtttttctgagatgttcctatgattccttggatttcctcagtgtctgttgttatgtctcccttttatttctgatttgttaatttggctcttctttctccaccctttagttaatgtggataagtgtttctcaatcttcttgattttattgaagaatcaaatcttcgtttgtttgtttctatgttactgattttagacctaagtttgattattttttgccatgtactcactttggttatgattacttctttttgttctagagattttgggtgtgctgttaagttgctagtataagatttctctgatttttaaatataggcatttagtgattttatttgccttttagcactgctttcattgtgttccctaggtttcagtatgttatggattcattttaattcaattgtagagagtcttaatttttttcttaatttctgttttgactcatttttcattcagtagtgagttgtttggtttccatgagtttgtaggctttctgtagtttctattgatggtgatattcaattttaatctatggtgatcatagaggatccaggatgttactggaattgtcttgcatggttgagacttgctttgtgtctgagtatgtggtcaattttaaagaaagttccatgagatgctgagaagaaggtatattcttttatgtttggatgaaatgtcctgtaaatatctgttaggttcatttggtttataacagcagttagccagcatctctctgtttagtttttgtctagatgacttatctactggtaagagtggggtattgaagtcttccactatacaatctggttttctgtgtcaacttgacacaagctagagtcatcagagaggaaggagcctcagttgaggaaatacctccatgagacacatggctttttctcagttacgtgatcattgaggaagggtccagcccagtgggtggtgccatacctgggctgatagttctgggttctataagaaagcaggctgagcaagccataaagagcaaaccagtaaacagcacccctccatggcctctgcatcatttcttgccttcaagatcctgtcttgtttgagttcctgtcctgacttccttcaataatgaatggcaatatggaagtgtaagccaaatgagccttttttctccccaacatactttttggtcatgctgtttcattgcagcaacggaaaccttgactaagacacccactatcaatatgagggtcaatatgtggtttaagctatagtagtgtgtcttttacaaacatgggtgccctagtgtttggtgcatagatattaaaaattgtgatgtccttttggtggctattcttttggtgaatatgttgtgtccttccctatctcttctgattagttttggtttgaattctgttttgcagatattcaaatggctacaccagcttacttcttgagtccagttgcttggagtatctttttccattcttttaacctgcaatgatatctgccctgtccttgatgttataatgtatctctttgagtaggggagaaaaggttagaggagaagatctgtgtgatgcccttgaaactggggccgggaaggagatgcagccaaggcatgtagtttgcgcacggctgggggtgagactggggatggggtttgaatttggaggatcagaggaagatctgctgttcggctattggtgtccttggccagagtagcctgtgggttcccagggaatgcctgctagagttgggggctgggataatgggatgagttgggggaagaaaagtttagaggcaaagatctgtgggatcctctggagatgtggggggcaaagcagcaggtggtttgctgcagagcagaggatgagacttggggggtggctttggaggagatgaaagacaggtgaggatgtgcagattagcctacctgcttccctgtgactttctttttttctttaaaaattttatttttcattttacataccaaccccagttccccctcccctcccttctcctgccccctcactacacctccttcccatccctatctactcgtcagagggggtaaggccttccttggggagtccaaagtctgacataccacattgaggctgagacaggaccaagcccctccccctttcattcaaacaactgtagaagggctttaagagtaaatggtcaggtgaaacctatttggatagtatttgaaataaaatacctgaagattaagcctggtctctcattttaaagtctaaagaggggaaaaaaggcggtatcattattaagacctaaggataccaatagattagtgttgtattgctgcagtccccttttaagaatgggaaaagtttggccaaagtcatataggagtcaacccgagtaactgtagcatgtgctcatgtccggacttagcaagcacatcccaagacaatgaatcatctaagaggatagtcctcaccaaaaccatcacaacttaaacaaagagaaagtgtaaccatgccaaatgagttcaggcacctggcctgagatgtattctagcatagaaaaagacaggggttgttatgctgagacactgtcagaaacctctagaaaagcattggaaccatattaaagaggagaaaatgtgtcccctttgaaatggagataaaagggtgcttaggaaaataatatagcaatggaattgacacagatctgttacgttctgggctggtatgccagcagagaggtcatgaactaagccttcacggcaggacagacagactctgaaggagcaaactcaactccactgactcctggctgggggctgtgacctcgagtgcatcccttcatctccttgagcctgaggttcttcatccaaaaaaggatgatagtgatcactttatagagctggaggaaaggtgcaacaggcttgtttatatcaagcattcagtccagccctcagtagacacaaagctttcaataaactctaatcattagagttaacagttctcaaatatattattaatcagatgactgaggagcacttaaaagggagatggcagtagtcaatcagatcctcattctataaatacattgagtgcacactcaggatcttccttagaaagctacgagaaggtgcagaagagaattgcgatttgcattctgtctctaaatgacaacatggtttactcattacctatcccaagttcccattgctgatttcactgtactggttctttctgctccatctggcagggaggttataattctgcatttttgtgtgtggcattgcaatctatctgttgccatggagagatgaagggaaaagaaatcagaccctggcttcagtacaaacagtgccaaagaacaaatataggtgggaaaagtatgtaacaaaagcaaatggaaaaggcaaagtgtttctctgcttgaacatatatagggcagcatgaaatctcagctggtacaacatataacaggaaacaaaattcagtgctctatattgtaaatattgatttgcattcatatttttagatgtataaagccggccatgatgatagcacaaacacaatgcacattataccaatgatacacctcttctatgttattttccaaatggttagagttaattttaaacccttaacattttttttttggttgtgattccaacacctgggttgtttgaattgcaaaaaaaaatttttgataatgacactacatggcttcttttcacttagatttgaaaaaaaaaggaaaaacttaagaaatgttattggtggctacagatgggtctcagggtggggcacagctattgtcttcatttgtgagccaccgatgaatacacactgggctccaatggatagctccaaacccatggtcacacagatggccttggttaaactcagtgagtcacaaaacaaaaagccaaatgtgagaaaagaacctgcagggataaggatgggtgtaatagagatgggagggagattaaagagggagggagggaggatataatcaggatgtattgtgtatgtgtgtgaaatggtcaaagaacaaatttagtaagtgaccaaaaataaattttaatcatattacttaatttcatagaatcagtccaaatccttgtccttctaaggaaaggctttattcaagtgatggcattagacactcaagacagtctgttccttaaccattcattagagtctatatgtttccatatatatatatatatatacatatacatacatatatacatatacatatacatacatacatacatacatacatatatatacatatatctcaaacccaagaggtctgtagggcactttccaggatttttatcagtttttagacaaaggaacaactatagaaactgttggagttttctaagacctcacttcttgtaaaacgcggatgagatgttttgactcttgccttctaactctaagcttgggggttataaccactctgatgctacttcctacccagcaaaggagtttaggggccagggcaaaaactgggaatcaggaggcctgtaacttcaatccctagtgtgaagagctgtgggatgctggggggcggtgcggacctttacctttgtaaagtcattttcatttgtagaagggaaaaaatgcagaggcctagagtgtgtggggtcaccctgcaattccacccatagtttgtgatcaaaggtggaattaccatgaaactaagaaagcctgcattctagagaccctcattgcccagttcctgcagacctcagttattcatgggaactgtgaaatgttccaggtggggcatgctgctgtcaggaagcattcctatctagtcacttctggtcaaaagcctgacgagattccttggatgtcagaggaaaggcatgaattattgctaatattccaggaatctgaaggctaaatattcattttatagttaattcatagtcatgaattttatcagtttttcattaaataaggcctcataaattgtatagtcagtgaattctatctctggttctgtgtaacaataagaaagggatgccgaataagagggattctgaggcaggcaggcagaacagaagcctcttcaagttgcttccccggttacatattagatatcttcctctttgaagtaatgcaaataatcactcccattctcactgcactccaagatgcaataagcccctcagactccttttacaaaccattttcttcagagaagtagggaatgtccaaagcatgactctttctgaaagcctgctgccttggtccctcttagagccttgtagatcttaagtggattagagcctgcagatttacacaaggagccctttatttgtccccatttccgtcctacaatactgtctgccatactcatctctgtcttgtcatccagttggaaaggtctggaacctctgggtgctcggttttcatgatgactaagctcaggaaggccgtggtaaagttctctaaggaagtcactccccatttattagacagctttgcatcagtacaataaaggacccgaggcaggacatttctgtagtaaaaggtttatcttggctcttgtttctgttagtcctagtccaagagtagtcagcccattcattccgatctctggtagaggcagtacatcatggtagaagcagacatcagagagggctgtcagttgaggcagtaacagaagagggtaggaagggaggagagaagaggggaaaagatagagtgtgtttgagagagagagagagagagagagagagagagagagagagagagagagtccctttagagatttagagatcatgtgtacaatggccatcactttcacccctcaacgtgaaccaacagcaccaccctagggtcagagcctttaaagcatggaccatgagagatgttatttatattcaaactacagcacatttgccctccatgtagactggagctgtccaacagaactttctgctgtgttggaagcatttcttgtcagtattgtctgaggtagtctttgccaatagtcattgcagcttttctagttcattaaattttaattttaataggcttgtatggctagtggctcccacattgagcagtacaactctaggctgcagacttcataaagcccaacctgtggatcagtctatgtaacaggtttcaggagagtccttacagacaggaataagcacattgtgaattagaaaaaaaatcagtagttcccagactttctataaacattggagattgatcactttgccctagttctataattggtattaaggtgaaatggaaacttatatcgagagcccactaaataccaagcatagatgtgtgtgtgtgtgtgtgtgtgtgtgtgtgtgtgtgtgcgcgcgcgcgcgcgcgcgcacacgcaccagaaacaaaaacattcttgcaccctttgcctcaccagagcttggcaacctatgtagggactctttctccacctgccctgccagccagctctcaaataaccacttactaattatgaagacttattaattatgaaagctcaacctatagcttaggcttgtccctaaattacctcttataacttaaactggcccatttatattgatttatgtggtgtcacgtggatcatggatcattatttcatctcctacatgtcactccttctctctggatccagttaggaactccctcttcttcttcccagcattctctctgtccccgaaatcctgcctagctcttggccatttagctttttattaaaccgatcacagtgacatatcttcacacagtgtaaaggaatattccacaacaaacctctgttatgttagtaacactgaagatttgggattgccaaactgaagaaacaaaagaagtagagaaagttttgccacattaccttggaggaggctgtgctcatggggttggtggatgtgaaggaaatccctggatggcaggtagaaggtgctaatggaggggcaataatgtggggggggggagaaaaaggtgagagcctggggcagctggtgaggggcactgaggttcggctgctaacagggtttgagggtgccctgctatggtgctttgctatggtgctaggtaccgcaatcatcacaaactcgaaatgtgctttttagcaccatgtcccaggcactctttatgcctatgaatctgttcaattcttaccccctaggtctcagcttgaggagaagctgagctcccaggactcaggaccgttgggactatgtgtgggacaaaagtgagactggccatcaagatggcgtgaaggagaatggacagacacaggcgctgcatctaaattctgcagatgcggacaatgcataggaacacacctctaagaaacaagacagaaaataattattctagtgcagccgtcccacctcctgtagcttccagttctaagagacagataccaccattagctccatttcacagatggacactggggcatacagatgacctaagtagcctgctccaggacataaataaaatgggagccagatagtaacttcagccatcggtactgaagtccatgatgtaatcagacttgtgctactacttctaagtcccatttgtcatctttaaagagacccatgggggaacacacacacacacacacatacacacacacacacacacacacacacacacacacacacacacacacacacggttcaatgtgatttgggatttatgacattctatctcagacaggattgggggagaagaccgtattggtttgaggtacattcagttccaagaggctgaatgacttaactgaaatgatatcataagatttgaataaaaaagatggactttacactttctttccttttttgtttttttttttgtttgtttgtttgtatttttgtttttgagacagggtttctagctgtcctggaactagctctgtagaccaggttggcatcgaacacagagatctgctgtggaatattcctttacactatgtgaagatgtgtcactgtgattactttaataaaaagccaaacagccaatagatagataaagatacaggtgggacctctggagagagtgtgctggaaggaaggaagacagagtcaccagccagatgcagggggagcagaacatacagggggagagataaaagctatgagttacttggcaacacattgatgactagaaatgggttaatttaagttattagagctagtgggacaagtctaagcagtctaggatataggcaagcttttataattaataataagactctgtcattttttgtgagctggcagcccaaagaaaaaccctttacagagagatctgcctgccctcttcctcccaggtgctgggattaaaggcatgcaccaccaccacctggttctctcgctctttctcatatatataatatatatattactttcattggtgttttgccagaagccctggacctggagttattgatgggtgtgagctgccaagtgggtgctgggagttgaacctgggtcctctggaagagcagtccattctcttaaccattgagccatctctccacctcctacatttttaaaaatataccagtgctttcagttttatgattaccctagagacttctgggggaaaggtcagcacatttttgagcccacactttcagtaaggagatgctgagttttgatagcacggatggaagtaatacctttcatgctctgcctcctgcagcaggcagcttttcccagggctactccacattggttgtgagggatagatcccaaaggggtaacagcaaaatgaagatagtttgggggaaattgggatttataagcagaggccaaaggaactagattttaggccggtctctcgattctttctcatgaaaatgatttttaaaaaacaggtgcctggggcataatccaaatattttaattggtagatctaaaaatttgcccctgagctctggcctggagaccagggagagctaggtgtgcatgtggcagctcatctgggtgcatttcatggcatttccacagcaaagacactttgggatactatagaacaaaggctagggtcaaattccagcttcgatccttgttagccataggccaactgaaaggactttaatcttattatcgtgaaaaacaaatttttgttttgttttgttttttgagacagggtttctctgtggctttgggggctgtcctgtaactagctcttaactcacagagatctgcctgcctctgaaaaaattttaaagataaaatactttctattatttgggggatttatttatttttcctatttatgtgtatgtgtgtgtgttcctgtctgagtttatgtaagccgtacatgctggcagagtccagaggatttcaaattcccctggaaggtacagtcggttgtaagccgcccacggtgggtgctgggaactgaacttgggtccttttcaagtagaagacagtcttaatgtctgagtcatctctccagtccccatgaagattatattttgctcacataccactatctggtgtgagaaattggatttgggcattattctgaatgattgccaaggtaaagcaggtactcagtgattttggtaaattttatgtaagggtagagatgaaagagcatttggaatgacaatgcctgtaagacatggggctgtgcaccagaaatggagaattatactctgaagtttgcaaataacttgtgatttcctttcatggcaccctttgagtactgcccaatactttagagttgcttataattaaatgaattggccatggaagtattttctgtttgaaaaaaaaatcatagggcataactttcagtttggggagaatttttttcattaaaagtacacctttatcaacgagtaattataactttaattgctcaaatgtccattgagcaggattctcttcaaaatctacaaagctctgagcatttcctgcaaagtctgctgtcccttaaatggctgccatggaaattccttaaaaggccaaggaaaaaccaaacctaccctgaagtgctttagatgtatcaacagaagaactaactaattctcttcaaagacgttagcagagtttcgagctatagcttatgcattgaaggaaatgaatgactgtcgtagtggcaaataaggattcttccaaacaaagagtaaagttatagagtgttaatcctccagctcatgtagcagaaatgccaacatctgcatgtggccacagaccatcttgggtttcatccccagaagaaaaaaaaaggattctaacggggagcagttgtttgtcctgctcttttggaatgtagtcagccagtgtctgtgagtgaccgcagggaaatttgcctgttttatcctcaagatttacaggaaacagaagagccccttttccaacggagaagtgaatttattaggtcctgagtgtttgctggggattccccagggctcactgaatgaccggtattgttgccaatcagcctcagccagcagagcctgactaacaatctctgctcgttttttttctctctcaaaagggtaaatttagttctacttcttgacatgtctgcctcagtttccccagctttcttcaagcaccaaaaccttatcattatagattgaatgtttaatataggacttgttgatagaggctgagattgaccttttgtatgagcctccactcgacctttcaaagcaaatcttggacccaggcctgtggtgagatattgtttatgatttattaaagcttgcctgaggattcagaaagcaaagtcagctacaagtcatagaagccagacacacacctttaatccttggactcaggattaagaggtagacagagctctgtgagtccaatgccacccagatctacccaagagtgaatcagtctaaaagacaattatagccacacctttaatcccaacattagggaagtatataagacagaagcaaggtctcagagaagcattaattctccagccgcagtgaggagaggcagcagtttgagacttagtgaagagctcctgcatggatcagcccgttcagcctgcaccagagatgagggctagtggccagctgctttgcttttctgatattcagcatgaagtttgaaccccaatattagtctctgggtcatttatttattcctgttgtacaggcccacattaattttctttgatcatctgggttgcattattagtagtgatctgtatttctcctgccggtccctcaggcaagtgctacttcactgacagatcagcaagttggtgagaactatgttttgatgttaagagatccaacaatagcagagctcattctgctcatgtgcagctttgggtagtttctctgtgtgcatagtgagagatgtgtagaataaatgtaaccgaagggttaaaagagatgatttatgtactgcttctagcatttagcaggatgactttaggtcagaaatataattttgaaaaattgattctccttgcttctcatccacccgaagccacttgtttagtaaatgatgtaataaatcacaagacgttaagagagtgtaagatagcaaaacttgtatttctagacaagctattggaccataccaaaacggtagtaattaattccttagaaaatggcataatcaaatggtgtgtgtttctcatgcgtatgcatgcatacccacacttgtattaatggggaaaagagcatgcataagttgtcaacagctctctgtgtatatggggagaatttcatccttttgcataaatagcttttctattttcttcaacagatgtaaattccttacagaactcgaatccatttctaaaactgctctgtagcccttaaatggcactgcatatttaaaagacactgtttccctggtgccttgtgtggcatgagaacactggcacagtttgcaggagcagcatgtgtccaggcttattctcacatcctggatgaagagaggggacctaggaaaggaccaaggaagatgtcttcttattccgcctagttagaggatatatgcctgctcaagaaacaaacaaattgtcccgaagcacagcaggtaggaaatggaaaatgttaagcaagggaatggaatggtcttccagaaaggaactctctacaggggagatacgttttcaaagggtgcagggcaaccagctgggatatgccattcctagaggttgtgtttttggttttgtttgtttgtttgtttgttttctgtctatctacttgctctttctcaacgggatgtctacctccatgccaatcgaaacacccagctcatgttgtatgtgctatgcatacagcacacacagcatataaacacacgcctgaatttccctgttgttcagatcctgtgtatagaaaagagggaaacctactgagatctaaacccttgctatacattaagtgggagagaaaaaagggcctcccaagaaatggaaagggaatggcactgtggaggaagaggaattctaaacttggtcgattagtaaaagtgcagaatctccagagcgctgtggtggtgatggtggtggtggaggtagtggggggctgtacaacatagatcccacgccaaagctgggaatcagaaagaaacaaagtgggtgcatagatagtatttgaaatcaagtgaacttggatttttttctatctgactttgagaaagtctcctcactccaacctcattaccacagtttctcatgtgaaacatccacataaaggagactgctttagtactgagctcagctgtgccctctaagacggccatggaaggctgatggagtcaatggaaggttgcagaggtattggtcatgtcaagggtaggtgggccatggtcagagctctcctgggaataggcagtaagaagatgcatttcctgtaagaaaattacaagctgaaataaaatagaaggaaaaaatatacattgcaaacattggattggtgggcactggcttgagatggtgacaatgccaatgagaagccattttccccttgccaggatgaccagctctatcactgccctgtcttatgcccactcaccaatagcacactggccgacagatgtagcaaagaaaactgtcactactggtttcttacaaaataatatatcctggaataaatctaactaaggaagtgaaaaacttaaatagtaaaaacataaagacacagaagaaagagttgaagacgaggctagaagatgaaagacctcttaagttgagctcattggtctatttggcatcaagtaagagatggggtcttgggttccttcttttacatgtagccatccagtttgaccatcaccatttgttaaagatgctgtcttttctctcatgcatatttttggcttcttggtcaaaattcagatggctacaagtatgtgaacttgtatttgtgtcttcaattctatcccaattaatcaatgtgtctctttttaatgccactatcatactatttttattcatcaatagctccacaaagagaaggaagtaagttcctgatatctcatcctcaagcaagggtttccatatttgtctatttgcagtttgtcaaaggagtaatgcgaggtcctgggccctgggacctgtggggttctgtgagtattctttggtactattgtgcaaacacagcccttctgcttcccgatgaccagggtaaattattcctgacaaaaatggtggctcctcttcttgccaactattccccgaacataagggacctatagtgcccacatgggttatagtttaacaagataactgctatttccccactgagtgtatcctcttgggagaccaggagttctaacctgcagagcctagaactaaaggggtaggaagcagggaggaccctggtcctccttggcatcttgatctatgtgtccttcctcttgggaacctggtgacatctaaaaggttggtgctttgagatgtagacatgtattcaggaggagagctctgttcaactgcaccgtcagtaggccacccatgtctacacagagagagagttggggtgggtgggtggacatatgatataaaaagagaatcccacagttgtaggctcttccccatgggctagaacaatatttgtaggcatgagaaacattgcttccagatctgatgaaaggctctcagcactgtacttccttgtttctcgtaatgatgcatttttttgtcttttactgtgaatacaatgtctggcatagaatgaattcaggacccctgaaagctttactgaaatagcaagttttgggatcttgcagaatttactgtcatttcctgacaccatatatataaaacaaagacttccaatatggtagttacctcttgctcatcatgtcatgcattttatgggttgatgtaataccatgcataatatccagatagttcaggtatctttagcatattatgacagatatgagaaatagtgtggccctgtagaaatgccagtttgtgacttgcactgcctattacatttgaatgtgaactgtttctaatggtcctttctgcttaaggccttcatttaccaaatctctacagtatatcacatacctgaggccatatttatctgtcccactggtgagcagcaacagacaggggtaccacttgtttgcatttgcggtagtcttcgggctctcagattcattcagttttcataagggtcaactggggattaaatggaactataacagagaacatcatccctacaactgtaatcttcactgttgcccccaggatgcagctttggctttgatttacttatctcagacagcaaattctgagatttccatttgaccttctgcattgtgacagctctagaggcctaggacccagagtgggattcatcttgactgccaggctaataatatcaattaatacatgctcagcaggaaaatgactgctcttgaggtccatgagtgaacagcctctacaaatcttactttggccagaagatttactgctgggtactaatgtctttgacttcttatgagagaccatgataacattttaggttctgccttttaaaaattactgaaattattttcatataatatattttgatcttatactcctcccagatactctccatctccctacccacccaagttcatgatctgtctctaaaaacaaaaacaaacaaaaaccccagaaaagtaacaaaagaacaacaacaacaacaaaatgaaaatcaaagcagactgtcttagtttgggttaccattgctatgatgaaacaccatgactaaaagcaagtaggggagggaaggattattgagctaatgctctcatatcacagttcattgtcaaaggaagtcaggacaggaatttcaacagggtaggaatctggaggcaggagctatatagaagccatgaaggagtgctgcttaatggcttgctccttatggcttgctaagcctgctttcttttttcattttttttttttttgttttttcaagacagggtttctctgtgtagctttggagcctatcctggcactctctctggagaccaggctggcctcgaactcacagagatcctcctgcctctgcctcccgagtgctgggattaaaggcgtgtgccaccaacacccgtcgcctgctttcttatagaacccaggaccacttgcccagagatagcaccacccataatgggctaggtcatcccccatcagttactaattaccacaatagtactacaattaccaccctataggcttgcctacagcccaatcttaaggaggcattttctcaattaatgttcccttctttcagatgacttagcttgtgtcacatggatatagaaccacccagcacacagacaaactaaaaaaagaaagaaggaaggaagaaaagtcagtatgacaaaagtaaaacaaaaagctccataccaaaaagtggagttcactttatgttggccaactactcctgggcatgaggcctggaagtgtggttgatatgcccagtaacactccattgaagagaacggattttctctctctaagcaagtatcaactacaagtaagatcttggttagtggtgggactttgtgtctacttccccttcttggtgctgggatttttgtctggtgctgtggaatattcctttacactgtgtgaagatatgtcactgtcatttatttaaaaagctgaacagccaatagctaggtagtattttgggggcagagagggacctgggaagaaggcagagtcgccagccaggcagggaggaagcaggaaagcagcaagggcagtacagagtaaggcaataaagccacgaggcagaacgtacattaatagaaatgggtgaatttaagttgaaagagctagttagaaacaagcttaagctattgagtgagattttataattaataagatgtccccatgtggttatttgggagctggcaggtgggacagagaaagacttgcaacagtctggtttgaacctgtacaggtattatgtatgctgtgagttcatatgtatagcagacccatcagttgtattactaagtcattgtcctggcttggtcttccctccctccctccctccctccctccctcccccctccctcccccctccctccctcccatccctccctccttccctccctccctccctccctccctccatccatccctcactccctccctccatccatccctcactccctccctcatttccttccttcctttaatttgttcatctttctttcttgtaccattagggttgaacctagggtcttgtgtgtagtagacaaatattctaccattgagctattttctcctatcttcttaggctttgttttgagatagaatcttactaagttgcttaagctagtcttaaactatctctgtaactaggaagttcctgcactttcactcttcctgcctcatcctcctgattagctgggattataggcctgtaccaccagtcccagctacacttttgggtctttatgtgtcaattaaaatctgaacccaattaaaactgtgtgtttaacagttgttgggaagtctagatacttctctttccttggtatggactaaaataaggaaatggccatgtctccttttgggaggaatttgagggtcattacagtatatggttgccatgatattgtattttgtcttgtgaacttcagtcaatgggaattggaatatgaaagtgggttttgttctgcaaattggctgccttgatgttctatgggaacaactgttcttagcctcttgctcatctttgttggctggatggctattttgttcctaggagtgctgagttttactctctattcacagttatcttgagggagactgttgtgtgttcttggttgtcatggtcattgtcaccacctttcttctggcaatcgagttatcatgcctggcctcagttggtggagctcaatatctccattgctatcagtgagctagagtctatagtagacttacatatcgttagctttgtccctaggaagttccactgaaccacttagtgatactagatgtggctctctcaccagcacactgccagtggccttggtaaatagtgtatattttactaacctttggcctcatatgacacacccatttctgtaagcccatttctctaaagctttaatttcttcttccctgtcttccatggcaagcaggcaattcagtttctcagtgggagccattcctttctccaggcttctaggagttaccatggcagcaaattcacattatttcctgggttgtcaaatcctgtttctcaatagagtgaccctaagtaaaaagcaacaaaacaaaacaaacaaacaaacccttttcttgtccagactcatgtccttgtcccctaatcaggcactttgattactgcttgcacaccctttgtggcatcttgtagctcctacagttctgctcactttcctttatcaggctgagcatatttctggtcagactctgatgactcagtcctgactgtaggcctgacattcaggaaaagagaaaggaaccatctgttgtcttttgaagaaaagacccttgtgtcaacttcctgaggggggagcagggcttgctcttcacagggaggggagggatatctctgaagacccagagggtccagagatcagggagcatccatccaaatcttctaatcctaagtgatggaagaccagattttgcaaactaggatccttaatttggttaatatccctgctttaaatttgaatattcagttgtctttaaggtttagtaactattaattccagtgacttatcttctgttcacctattgtagaaactcctttcacattgtttgaattgtttgcaattttttaaacattttattattctcctatagggcatcaatatattaggtaacagccactaaatgctgttcttatccttataaatcctcttctatgcttcaaatgcttcagtcagtgtattcccctccttcagtgtgccaccctagaccatcagtgatggacttttaaccaacaagtctccatctcatgctaagggatgtctatatgcctttccaccagggaagtggtcattaaggcagttgagtggtgagaaattcagtccccaagcattttattatcaactgctttcttaaatcacttttagtactaactactcctatatgttgtttttttctagacagcaggtcatgatatagtgctggaaaagcaaaagatttggggtgatatcatatgttatggtaaaaaggaaagagaggaggaatgtacagagaaagccatcaacctgggagatatcacaaagtctgtcaacccaacaagagttccaaaaaaaaaagaccacccattagcagagtgcaaagttgaatggagatgagacctttgaagtacttccttcttggctactgcctggagagtaagggtaataatacgaaagatgctaagtaaaattggctttgcagataaagaatgactttttaagtagaagtataactcacacaatatttgagataaactaaaaaataaaaacagagcaaaaacagtaaacttcttgttccttgtctccattgcaaatttaaccaggtgttctgaattttaatttgctaaatctggcaactctagctgggtgttattaatttcaattttgaaattgattggattgagaagtgcctagggtattggtgagacaaacctttaggtatatgatggcatttccaaaagaattaatgtaagaagtaagagctacactgactgggctgggatccagaacatagtaaaaggagaaaaggagaaaaccaaaccagtactggcattttccttttctttgaaccagatctacctagatttgagcaagcagcctcctgctgccacagacaagacttggttttccatcatgccttctctgctgttgtagactgtattccctgaaatgtaagccaaaacaaacctttcctctctcaagtgttgtctcactggatattaggtcacagcaatgagaaaaatagtggaaataccaaccagagatcactctatgatatttctcagctacttccactttcattaggcaattatcttggagtcaccttgaaaacattgtgacttggcttgatcggactgacttatggtagactgaaatatgatccagctctggggactgccaagaaataaacatgtttctttaagggatctgagcaggtctctgccttcaccatatctactttctgtgcaaatgttgtctgtcttgatgagagcaagcctatgaagaacatgagttttcttgtcaaatccccagttactaactgtgtttggctcctggtactggttctgttgttacttattaaatagatttgaagggaacaatttaagggatcaggcaaatatggataaaacaagaaagagggggtcctctgttttcctgttctcagaatgacactctgggctttgctaacccttcaatagttttctgtgttacgcttacaaggaacaaaggtaaaggaggatgatcagctgtaagctggagtccgagttcacacgcactgacttctacatcagagctaattatttggggaattaattaaatcctttccaagtaaactgagtaggctctagttgaggaatttcaaaaacagatcttgtacgtgaagattagtgtggagtaccaacatatgtgcatctgccaccatatatatatatatatatatatatatatatatatatatatatatatatcacagagggcttaaaaccacaagaccttaaacagaatttattcttttgttccagcactgattcatcgtccatatcatttctagcagagatgttcttattccactttaaatttgtgatctaagctgggcttgggagtgcagccctgtaactccagatgtttgagaggctaaggcaggaagattttaaactccaagccagctaaggctacagagtaaattcagtgctagccaaggcaacttagcaagggtctgtctcaaaataaactttttaagaaagtttatttcttcaccccctaagggctcagggaacatggggcaagagtggattagaaggttttaagagctagaggctggggacggatgttgtgaaatgtccgggacatggcagggcctttaactcatgaattttccgtagctatgtttatctgcacacgatctgaacaatatcagacaataaaaccagccatcatcccaatacgtggagccaataaaacttagtaggctaaaacataaagaggatgccgggcggtggtggcacatgcctttaagcccagcacttgggaggcagaggcagagtcaggtggatctctgttaagttcaagaccagtctgttctacaaagctatacagagaaaccctgacttggaaaaaaaaaaaaaaacataaaagggatggaggacatgacggtaagaggaggatgtgtcaacagtccctgctaagaaaagaagagggtgcatgtgttcaagataaattgtttacatgtatgaaatcatcaaagaataaataagaggcattctattttgaaaatgactctaaagaagatgcaatatcctcatattcccccatttgacctttcccattaatggtaggataaaggccagccctctttgcacaaatattaaggccccctggttctggacatgccacattctctcttatccctctgctgtgagggacatcgcctcatgaacacaccatgttcttagtatgtttacccgtctttgttcaagttggcttctttgcctgacattgctttaattttacctttccttttgtctagatcaatggctctcaaacttttttggagtaccagtcatctgaggattttgctagaattctgatgctagtttgacattggtttccccaattgtttatgtctcccttcccctcctctctccttcccttccctctcttctctccttctcctatccctcccctctctcctctctttttgtttgtcatgctgctgattgaattcaggggttttggcatgctaagctagtcaattgcatgtgtctcatagttgatactgtggctgttccatggagcacataaaggcctcctcaacactcacctggacaaaatgttgtcttttctgaactttccttaactctcccgggagaatgtgactactttctccttatacctatagctcactatgcctgtgcctggcagttttgggtttgttgttgttggttttttgttgtgtcaacttgacacacattagagtcacttggcaggagagaatcttatttggcagactgcctccatcaggtctcctgtgagcaagtctatggagaattttcttgattaatgattgatgtgagagagcccaccccattatgtgtggtgtcacccctgggtagttggttggtctgggttgatataagaaagcaggctgaacaagccatgaggaacaggccagtaagcagtgttcctccaggtctccatttcagttactgccttgactttattcagtgaaagacagtgacctgacaagtaaccaaagataccctttcctccccaagttgtcttggctagagaattctatcataacaaaggaaagcaaacacaatgccctttatccaaagcattatttagcattttattgttgttttccatttgtacactgaaagcgaccttagggaggggctatattcctattttaagattccaagcccttactgcagtagcttgcttagagtagatattcagtaaaggactgttggatagatgagtgtaacatggaaagcacatatccatgttggattctctttttccactttctgttgtaagatgagtatgttaaagcattcttcgattccctggatggtaaataccggtgaatttgtcctctgtaatggatttatataactgagtcgggtcctgagaagctcaaacaactgaactgatgagcatctagcctttaaggcaggctccagtgccagagcagcctaggataagcaacttgctgggcttttccatgggaggtgcctctggctgactcagcctaggctatcttctgtttctttccctgtttgcctttagatcttctactgcaggctgacttcttccaggttgtcagatttgggggcctaggcagcccaacctcagcaataaaaaccagagaaaccacatgttcagagtttgagtggtgagaggctgtgtggtctctctctctctctctctctctctctctctctctctctctctctctctctctctctctctctctgtgtgtgtgtgtgtgtgtgtgtagagggtgcagaggagtaaggctgataccagaagtgagaaagaggttacatcactttcatatagaataacttgcaatgcagaaaaaatgtcatcaacatcaagtgggaaaaatgaagcagacagatgggctcagagcagaaccaatgcacgggagctaaatacatcttctctttactccactagtgacaggggctggtgctgtgtctggagtatctgtgtgccaggtttccacacatgcctttaggtacgcagtccccttccgagagaggaccattcaagccacctgcaaggtttcgtttgtggcattatagaagccttcttatagcaaggcgtggcttttgaatcatacactagctttggcgttcctctccataaaacaagactaacaataacactcacctcacagcccaccacacaaacagtagccggcatgtgtgtgaagggccagcattactgggctgacctcaagcaaggcaaaggcaaagaaaggcaaagtaggaccagtgtttctgttgaaaagttccaaggggccacctaagaggaggcagtacaggcaacttgcagcctggggaacacgtttaacctcggtctatgggattgctgggcctgtgctgtttcgctgggtctataaagtcctattcacgggggagtgtgcagcagaaaagtgcagtctctccctgctcaccacggcccgttattacacaagagcggttggaccgcagttcccctgagagtggcaggggagggtgggaagagttgcgagggtgcagaggtaactgtcattagagtgggggaaactcctgcgacaacttttttttttctttttaaaaggacagtggtgatttacgtaaaagaaatgcttctctttgaaagacaataaagacggtttcctgactgtggcatttcctcctgatcctgcttttggcttgctttgctcttgttactctgcagtcgcttgtaacctggggagttagctctgtcacccgctgttatctcccccaaatctcttggccgcctcaggaaatgcaaactaactttaatattggtttaagcaaaaccagagcaagattaactggctgctgagaagaaacagaaaacacccccaaacaaatgaggtggccagagggaattgtggacccttttctatccacccagcaggactttcttcaggcccccatcatctgccagttacctgccactttgctggtgtcttctatggcttgcgtctgtcaaggatcttggagttagaacagcatcatggctaaaaatgtataatagaactctcattcttgtcctctattttgaggaataagcaatcagaataacaactcaacacccccccccccaaaaaaaaaaccctcacaaaacaaaattctaaaacaatgaggcaaagtgagggataccgttttatggttattttcacatactttacagttgttctgtctttatcattatttctctcggtagccatccaggaaaatattgaaaatgaacacatcatctatccctggcagccatttccagaaccccgacatcattggtattggaggcttgtggtctgtcagtcacactgttaagtaaggagatgcttcagcgtctggagagatagctggaggagctggtgcagctcaggcctgcagaagcccagaaaaagctttatatcttttagttcacttcattcaagcaacaggtctgttaggtattgctttctgtttcccactttgtagatgaggaaatccaagcttatgtcctgttgccccaagattacctaactaataaatgggaaagcgttatgtcaatccatacaaccacaactaaacagtagccaacatttagtaagcagttgaccttttccaggagctcttacaggcctttcacgctttctctcatttactcttgtgagccaccctagagacaaggacttaggactttgtcatttacaggtgaagacactaaaacattgaaagaggcatccccacatgcctatctcaaagccagggcaccggctgggcgctggagactcacctcatttgtactttaatttgatcaggatcttcatgccctggtactatcaatgtgcccctggcaatgggtgcctggggctcaggggggcaggctgcatgggctctgcagtggcctcttctggaaatgatagtagcaagcaatcatactgtattcactgctgcagatgtggtgccagaggttgagtcagggggggaatttttctagataaaggaaatagactatatccaatatttctttttaaaacttgattcttcaacctttttctgcctgagggctatgttgttgaaagaaaataagcaaggctgtatctgcccctagggcttcaaaatgttgctgacttggcttgggcaattttaggctccaagaagtagcggtgaccagtccctggactgggtatcaggccaagagatctccaaggtcatttccaagaagaaaaatcaataggtctgggaggagtgggatccagcctagaaagctgggtcaagactgggccagcataggcatttctctggctgctacgggatgtcattgacccttgtggatgttaaaggtcagtgcatatcagtgcaggttatatttacacagtgggctaaaattagctggcatgctctcctggcaacagggaggatataaggttcccaatttatctagcaatgctaattttggcaaaccccaacatggtttcttctgttctcagtggataggcattcaactacaataacatccttttccttcctcatcctcattgctacattttaggaaattacaaatataaactcaggctgactttgggtcagcaccagttcctacaaatatggatgtcttaacaggagacttgtaaaccttgtaaacaggagaatttagtgactcctcaatctacaacaaaccacaaaaactatgtgttacaatgttttcagcaagaacagtggactaaaaagggcactaattgcaacatttgcattgtgttactgggaccttcaggggagggtaggtgaggacaggctacttgtggtggaggcaggtatagactggctcaacctccttggagtctgtcctgaagaagagggaagttctgtgtatctggatccaacatgagaaacagatgagatccattatgtatcaggaatagtatcaggacatgtgtcaggcattcatgatacaggcagtagagagtataagctaacaagtgtaggctaggtatgttttaaattaaacctggttcaagctacatggtctccttggatggcaggtagttgacgtgaacatattcactaaccctaggcttgtccttaaagagaggccagagatgataaaacttaaataaagtgcctggtgtctgaggatggctaaaagaataaatgagggagatgtgggagaaatatgacctgaaaagatcagaaaagtttcaataagaggaagtgtctgctatattgctgtgctagggaagtatattggaaaatgaaagaaaaccatctgttttatgagatttaaagatatatgtctaaaaagtaatactttcccatttttctatggccagcttctatgaattaatgtttactaatattaaactagggctctgcctttgtctaaataccatttttttcttccactttacttatttacgtgatagctttatggcctatattttaatatgtaaatattcattaaaacacattattagaattaatttattaacctattatttcatgggtgagttttacatcacagttataaaggtctagttttccagtacttttgtgaattcattttctcatgcatatctttgatttatctttaattaattttgtgtggtctgagctactcaattcaactttacttctcacagccaggtcactcatttgtttgaacagtatgtattgaataaataatattttccccaatgaattgaaatgccacattgccaatttaccaaccgtctaaatgtgtttgggtgtgtactgtatttcaattagaatacatttgtttattaatttatgtgccacattgctaaaattattgtggttttctactgtgtgttaatatctactcatgcattttaaatattagagtgcttttaataatttgaattttttctcataaaaactttgagttggcttgtttaaatttcaaataatgcctactgataattttaattctaattttatttttgtattcagatatttttcctatatgtatgtatgtccttacaccacgtgagtaccttgtacacacagaggacagaagaggttcccttggaactggagttacagtttgttgtgagctgccaagtgggttgtaaaaattgaatccaggttctctgaaagagcagtaaatcctcttaaacactgagtcatttctctaccctcagtttggtaatttaattttatttttttaaaatttttttcatttaaattctttaattactgctcatatttacatatccatccccccattccctctccctcccatcctcccatgttccctaccaacacctccccaacccatccccaaactcctccctagggacagtgaggcccttcaacagggaccttcaaagtctgctatatcgtttgggggagggcctaggccctccttgctgtatctgggctgcaatagtatccctccataaggaatgggtttttatcaaccttgaaggaattaatgattttacagtctaagaattttctgtccaacaaggcaggtcttccatctgctcacatcttttgatgtctctataaaatgctccttttcccctctggggattgccaggcccccctgcatgctagatgaggggtctaccactgagctacactctcagacccaacattctcttataaacaccatatatggaagactatggtctaaatatgaaatgtccaacaggatcatatattgaaggctttggtgctgctattttgggatgttctggaaacattgggacaaggacctagatggaggaagtggattactagggacatgtgcttagcagccatatttttctgtcatcttttcctgttttccccatttctgattcctgaccactaccaagtaagcagtctgccccactcccttctctttgaatgttgtagtgttgtagtttactcctagatcaaaacatcccatcttacagaaagctccctaagacataaagtaaacaactcaaaatagcttcaggaagtctctgaaactgaccagattcactaggtctcgtcctctccataagtaaacagtaaagactgctaagagacactaagagacaccctaaagaagccaaggtgcaaagaagaagactctgaaggtggggtattaatgagttcatgagacccaagataaatgataaatgggttttttttttattaagaacaacttacacagataatagtaaagaacgtccacagtgttcctgccccagaagatgcagtctcggcccttctgattcgatctgcaacccaaaagagagagtctgccccatgcttctctaccttctggtcaaatccacacctgaagccacacccaaaggggtgtgaccactaacacaaattcactggcaaggtgagatgttactacaattccccttttagtctaaagaagaaggttttaaatctgatgcaaaaactatatacaatgataacaaatgtcacatatattccaggaaaaggaaagataaaaacatacacaaaacctacagatgagtgtgtttaatcttcccaggaaaagtctgttacataacacacattcatggctatgggatcattcacttgatcatgggcaatgtaccagtagctatatcaccattcagaggccatttgacttccaatagctaatgttaatgattgtgtgagttttgggtagctttaattatttttctccttactatgggttatattttcctccttcgcatggttgacagctttgcaacagatcttagacatcgtaaaatttttttctgggatgtagttatgttatttggaaatactttgatccttttgaatcttgcttgtaagacttgctaagcatgactgggacaatattgtagtggaatgctaccttttccccactactaatgtctcttctgtgtggttattccatgctttgggaatctgttctgactggtgattgctggtactgttacttcaaatcctttctgtgattctttcaccagtctcatgcatgctggccggcatttagctgaccactcaagaggaagtttccaggttttcactgtgctgtttctttctccctagtactatatattagacaccccagttgctttggtctcattctctcaatcccatctctcagccctgggagagaaccacacccacctcatgtttctattcttgaactgcagcctgtggagccttgattgggatgttggggcaattataggctcatctttttcatgacctcatggatcttttattgtctgatgttcagtgtcttgaaaacgggtatttcatacattttgttcattttcttttactgtgggtaaagtatggcctcattactccgtgttggctccaatctaactctaaacatttccaagacagactcatcatggggtgtgaatagctgagttgtctcagggacaggttgagaaggaggccttgggagtatactttgggagacgtagctagctggtggtcccagaacgttttcctaaagggctcactttcccacgcaaggcatatctctgctgtttattctgagccctgcttagatgaaggtgccctagctgggctgcttccatatctttaagagacagatttacagagatgttccctgccaccctctgtgggaattacagggaatgataagttcatcagcagacttcaatcagccaggcttccaggcatctctgatatactgaatttatgagagttgaaaattccataggctttggggccaaactaccattcacatttgaagtaaataggaattagtttgtggttctgtagttttgtttcccaacccagcacctactgcaaaaatagaaatatcagtgcctggtggtactgaaacatgccaactgatattgtgacctggaggactatgctagctggcaggctgccactgccgacggggaaatcattcctgtgtgataagacaacaacaaatgctttcccagtggctgagattaaagtgggctctgccttatgacaacagtacttcaagcttcacatagcaatcatttttgctaaatattcgtatgcctatttatactctcattggcctaatccgaaatcagagggtttagaatttaagacacaaccactttccacttgctgaagaaaaatgagtagattctggcagagtagctcaggggttgagggaaggacaggcaaagggaagctagtagacaaatttgcaatcaaccgatccttagaagaactctgtgtgttctgttgaagggagatgctaaggtctagggggtgtatcagttaatactctgatctgggggccggggctacgtttttcctaacctagcagtacaaaaatgtgtgttgaatgagtaggcagataagtgaaagttgagttttaaatttggtgtagcatgtagcctgaggtggtagacggaagatccgtgtgctctgggctggcatgtgttatcctgagtcctgctggccttagctggggaagatgcacatgcccttgagagcaagagatgaaggggaaaagatggtagagagagacaaggggggagaaggaggagggatagggagagggaaagcatggcagaggacagagatactagaagctggttagaaatggctctcctggagttctctagaagccctgtgacattccctttaacctctgccctcctttcttcattcacatggagtcctgtctgcttatgtcactgaagagcttatgggctttaaagcttcaagacaagacagatgctggcaatttatggcactttgacaggaccgtggaaagggagtacagactttgtaattgcctccagtagaaccagtggatgaagttctttctagattctctgtggaactgtcgaggggcttgtctgaagattgggagcattggtcccaccacatctgggcctccacatggatgtgagcaaatttgttttctctagggcctgggtgactggaagactggaattcctctgggctggagctcctctgtgattctacaggactgaccactgccagtcctaaggtgatgcaggtaccctggaactcactgctgcaagaggagtgtgagatggagggcatgctgagtccccaggctgccccaatttgatactgtgaagcctagcatattgtgttgagagaaaagcaacctggcaaactggaagatacacaagcactaaggagactgccgagcactggacaccttgtcttttgaaagtcaggtgccttctgccctgctttttccagttttcctcaccatacacacaaatacctttgctctgcagcttagtctggcttagtccttcaccaaggcaggagttactgtgctcaaagttattagggccaaagccttggccctgctaaccctaagaagctaggcttggccatccatccccaatagaccttttgtttttgttttttaaagcactgtttttatgagatctcacctatcaattgcaggccttactctcctggcaaatggagtcctactcagaaagccctttcctacagctgcatcttgcaaggtgttgtctatgttttcttctagcaattttaatatttcaggattcacattaaggtcttctatctgtttggagttggattttgggcagagcatcagatagggtgtctagggtcattcttctatgttcagatgcccagtataagagctaaaggcaattaacaaccactgagaggtggagaattggtcttcctccagatgagacccctaaatggttatccaatactaagaagtcagccttaaaaatatacacataagcactactaaaccaactcagcaggttgtgtttatacctttattcggatggatgtataacaataataactaaaggaaaagaggccgtgaattcgagagggaggggggcacacagaacagtttgcagtgggactgatacaattaacattttataggaggaagaggtgataatgactcaacgtggacatactgggaagaaagaagaaatttggtgaaattctgcagggctgtccttgggatcctgtctgaagagaaggcaagagatgtgcagagccaaacagtagtcctcggcaaggcgtggtcccggccattgtctaggcttcagcctcttctgcaaggcagctcgacaaaccatgagaaacggtgtgaagcctctctccagcagacacgttgcctccttggcgggtactaggcttcagcattttcctccttcctgcactccatgcttggtggagattccagtttcttctgggccctagtttcaatagccctggaatgaaagagaagggagacatgtcttcttagaccatcgccattcaagtcaggatggttgcattatctgggcacaggcacactctagtgggactcagatgataaaaaaaaaataaataaaaatgttatttttaattgaatccatacatgcccacaaacttagagaaccagaaacattacttttctatagcttttaaaaaataatgttgaatatatttcagagtctccattctgccaaagaggaaatccatcttaattattagtgaagctccatgctgattactattgggtaaaatggcacatcgttagcatgaccattttgctaattaattgttgggttacagctatgacaagcctcggagccagttacaaggttccagcttcgttccatctgatacactaagatatatcacctagtggggctcttctggagggtggggtgagggttctagaggaaattctagtatgggggagatgctccataagctgcatgtggtctttatcttaggggatttgaaatcagtgcagagatgtcactctaggtaggtcagtgaggggaagttcttagcctctccatcgtgcagaaggccatcgctggactaccgagctgctgttgtgcaaggcaatctagtgaattccatgtgaagttttaatctaattaatcttaatcaaaaaaccaggagtcaaacattagggtgagaatgtggaagatcagagaaccaggagcagccaccagttgattcctacctgtctccctcctcgtctaaaagggcagatattctgtctccaccccacactattgcttcctgtttccacctcccgagtgctgggattaaaagtgtgagccaccattgctcagcttctacggttaactagtgcctagctccaccctctgatctctgggaaaacttcatttgacagaacacaagcaaaatatcccacaatatatatgtgcatgcattcattccatcattctgttcctctagcgaaccctgcctcatacactgggcatggtagtgtatgcctataatcaactaaagaggctgaagcaggaagatcaaaaagtattccaggccagcctgtggctagatagcccaagcctgtctcgaatatggaggtaggaattaaggctatttgcttaaaatataaggggaaaaataaggataagaaattctaaatgggaactttatcagattatgctttcatccacagcactgtcatcctcccatcattgaggatcagctatgtgtttgtaactatcagacttgcatagagtttgtaacgctagccttttacagttattctgcaaggagatcccagccctgtgttgtctgtctctatgtggtggcattttactgtgtacatataaagaggcaaaatgactcctcagtatgattacggattagggctggccaccggagaaatttagacatttggaagacagaagtatagtaactgctgtttctatgccaagcactgtggcagcttacacatatgtctctgacatgctacctctgcttgcctggtggggcagcaaactggctcccagcttctcattttctcagggatttttcctgaaatttctctgaggcctgaactggttgcagatgcagtttcacggccaagagcactcactgccttcttttagaagtcatcctggcgtcaaggttggaatcatttgtcttgtgttctcatttgtccttgtgagttccacacacccttgtgggtcctactctgctttattaccaccgatttcttctttactgctgccacatctaatctccagtagagcaagtctgaaatcagaggcagaagcaacggcttttcatagacttcaccaacctgtcatgtgactgtgtgaggtggaagccctataagaagtttgttgtagaatattattttaagatgcgttaaattggtttgtgctgtggaacatttgtttagtgatgcaaagagatgttgtatttgtttaactttgtgaagctgtgttactttgcctgcctaaaacatctgattggcctaataaagagctgaacagtcagtagcaaggcagaagaaaggataggtggggctagtagacagagagaataaaaaggaggaaagattggagactgacaaaggagaaggagatgaggactccaggggccagccacccagttacacagcaaaccatagaggaagaagtaaagaaaggtatatagagcagagaaagataaaagcccagagacaaaaggtagaagggataattaaagttaagaaaagctggcaagaaacaagtcaagctaaggctgggcattcataagtaagaataagcctccgagtgattatttgggagctgggtggcaggcccccaaagagtaagaaacaaccaacaacagaagttctttcatgtacaacactcacagtagttctctttctctgagaaaaccctaagactggtttcaagtaataagtcatcttcacattgcctaggcatagaaaggctgctttaatgacttgggaatgcctaatggctttcaactaggggaacacagtgggaccacagggaatgagatgttccgtattaaagccaatgactacacacaaaattccttctctttcccatgtcctgttttcagcccattgcctggttttgagatccccttcaaaagcaagagctgtcagcacacctcacatttccttactttgaaaactgggttctaatggcattaccttctcaagtgcagcacattgtttcatgccttacttaccttggtgttcatccccgcaggcaatctgcttgctaggattagttatgcacacactccccacgtgcgcccaccactggacttgtcccagctaccgttacaagaagagagcagagccttcagctgcaggtctgttcaagtatgagctcagttgtcctcaaaatccactaagcactgtggatcttttcttggtggtagatggggatagatgcttgccccacactattgaacccacagaagttttgctgaggtagaatgtcctggaatgtcagctgggttgattctcctgtggtctaatgtgcaaataccttagcaacaaattcagaatggtagattccaaacagtaatgtggcctgccgtggagaccaagtctcaaaggagttttagcctggctgactcacagtgaatccagtgggtccctgagctcatcctgcagttattcctacagtacttgaatgtataatggggataggtacactaagaagttaacagaataactcacattggttcgctgatccacaaagtgaagaatactatgtttggaaagaccatggaagtcattggcttgcttctcaggacaacggtgaacagaaacaatatcatattcctagagggattgtaatttgaaacatacaggactcatggttcctcccacatctctgtgtgactccatttcgattgtgcagcaggtagatggatcttggagaaagaagctggctcttgtagatttaaccaagtcgtgactttgattgcaactgctatacaagatgtgttttccttgttttcatggattaatacatctcttcgttcctgatttgcagctatttgcagctcacagatgctttgttgtctgttcctatctataagtcccattagagcaatttggtttaggcaggcaaggttagcaatacaccttcgtggtcctctctgaagagtatatttttctcagccctgtgtcattacttattttacaaggatcttgatcatttgtttgcttggttttttataaacagtatcatggcaggttgttacaataatgacatgatgattaacttaatgagtgactggtcaggtgtcaagttaatgagggataatggatgacatgaattatcagcttgataggatttagaatcaactaaaacatacacttttttttgtgatctaacaaacaaagcttgcctgaagactggagcacagagccagccacactagttagccatagaggtcaggtggtagtggtatgcacctttaatcccagcactcaggagataaagagacaggtgaatctctgttagtcaaggctgtcctgggttacacaaaattgacccagtctaaaagagaaacagagccaagcagtggtggctcacacctttaatcccagtacctgagaatcacacacctttaaccctgcactaaggaagtagagacaagagtgatatggttgtgcagagagagaagaatataaggctggaggaggaggagctcagtgcagtctgaggatttgtagagatgactgcagtctgaacagcagtcagtctgaggattcatagagcggatgcagtccgaggatgcagactgaggaatagtcagtctgaggaacagtcagtctgagaacaggatcttccctttagtctgagtgttgatagaggtaagaactctagtggctggccaatctgcttctctaatccttcagctttcactctctgatagctgagtttgagtttttattattaagaacaactagaattcatgctacacttcttggtttgtctgtgagggcatttctagagattattaactgacagggcaagacccaccctcaaagtgagcattttccagtaagagtcccagatacaaagacatgtaaggaagaaacagcatgtatagcatatttctgcctgcctttgtgatcttattgctgttcctgtcatcctctgttggctgcatattctagccttttcaaattttcaatatggactcaataccagtgactccccagtgaccttctgggttttcagtacagtactagaactgctgaagcatccatttttttgtgggatgaactacaccgttgtctgcttttccagtgtatagatgaccactgttggactacccagcttctaatcgaataaatccctctgtacagtttctatgcattatatactgggttctcttcttctagagaatcatgcctacttcttacttctgactctgcttcctttaccagagttttccagctcagtagagtgcatctaccatgttcagaagactacccaactccatatgtgattcagcccagcttttgccctctgaaatcttttgacaagccccatctctcatctccagttggagtcatcctgtcactgcaaagactcaggatggtgctgaacagcaaaccatgtacacagcctgggatcagcttccaaagagctctttgaaggctgctggggctctaacaaagtctcagagcaagacaacaggtccgaggatccttaaagcattcttattgttttgaagataaaaccatgttctttattccagaatgttgcctgggaattgttaccagtgatcacttctactgctcatgcctatacatattcatgtatacattacactaatatgaacatgtatatctcttggtcttggcagggggtgctttattttgcccatagtccttagttcctaggaatcttataaaggaaaatactatagatctacagaataatagaaagcaaacaaagctacagtgcaaatatgtataaacagtgtgctcaatcaaatatttagtgaactctagtttcattccaggcactctgctaagagctgccaaggagctcactgacgaattaagacgtggtccccatgttttcacaaaattgttaagaaaacaaaacacagtaagtgaacattaagtattgagactgtttatacaaagcaacacagaggaaattatatattgggattgcttctaaacagcattctgcaagtgattataagcataaggactgagcaatgtgaagagatccttggagtgttttcagtcctgaggagaatgtatcttagtaaacaccagcatctgagctacccatttccatagtaaccattctaaggaagtggtagcattaatacttatttgggaaattaaaataatgatagcaaatgctgaggtggactactatttaggcaaaggtaatatgattttgggggtattatctgatttaagcctcatagtaacagtccgagttaacaagtattatcaaggcctcagagagagtagacaacattccaccctggaagtggcaagatcgatttggccacagctcatgcttctaagcagtaggtgacatgtcaggataggagtatgcctcatcctacttctttttgagagcaaagaatgcagaaaatatgagttgaattatgtggaggaacaggttgctggaattagggaataagaataaaaattctcctatgtacattccacaaacatgctatgggggaaggaatatttgtagacatgtgtttacacacagaatgctagaaagtcaacctttcattcaaataacacttctgctagtacattttatatacagtagatggaaaatcacaaagattgttattcttgacctctgtaaagaggatacatgtaggtgtaatataaaatttagataatagctcacaaatttaacaaatagttcagaaaattaaatttttgtttctaaaaaatgggcaaattcctccacaagaatccactatcattccagcagaaaaccttggtaattcttaggagttgggatattctgtgactgaccaattctaaaatgggaaggctcattgttaaattgccaagaattttccccaaatacgtagattttatgatggtttgagtgtggtatgttgggagtgtctgcaccatggaaaccaatgaatgttctacatcactccaagagccgcctcttaagggtggacagcacatcctcagcctagtagcatcgaccgccttagctagcatcactttgctcacttcagcaatcttgcgacagtgaatattgctaacaggaagaagaatgagtggagagagggaagatagataaggaatgtgtaaactaagttaagagcacgtgacaaatatagattatgattctagcatcaagttgcatgtgggaaatggttggggaactttaacaaaaaataatagaggactcccagagccatagacacatctagtgataagctatagaaatgaatcatggaggtcaaggcttcaggggggagtttagcacaatggcatgcgttcttctttgctataaaaattaacgtattgtgacacagctaataacttgcgctggctagttttatgtcagcttgacacaggctaaagtcatctgagaagaaggaatattgggctgtgtgcaagcctattggacattttcttaattagtgatcaatgggggagggggtgtagccgccccagggctggtgatgctggcttttataagaaagcagaccgagctagtcaggatgaataagggcctccatgatgtccgaatctcttgctgacacaattctgtgtagttctctctttctacctcttcatgggctctagggatcaagttcaggtccttgggtataccagcaggcattttactctctgaaccatcttaccagtgcaaacaacagccacgtcacagttttaaagctgtcttcccctagctgcctcttctccagtcagcttgcctttgtttacacttcttgttttactgattggcccactgctgtgatatttctgtatttggtttgtttgcaatttcttaattttcccaatacaattattatgactgcatctagaattcattaatcatatttgagattcatattctgctatgtttattttggatcctttgagatgctgcccactgtttcctcagcttctgagatgccatcttctcctctctctctccctttcttatctgccatatcattttaatgtcttttcttatctattaggctttaaaaatattttatttacttttgacaattttatacatgtatgtaatgtatcttgatcatgtccattctaaactcctcttccttgtctctaccatacttgttcttccaaacttcatgacatttcttttaaagtaatccattgagtccagttagtgctcccatcgtggacatgggtgtggggtcatctatcagggcatagaacctaccaatgtccacaccctgaaagaaaatggctcccctttccccagcagttgtcaattaccaatagctccttagctagccatggtgcccctggcttactagtttttattcacacagtatgacttgagttttaagtgtttttactgtcatctttgggagagtggctggtacagattacttccctattccttggtctccattttactattggaaagaaataaattgatgtggtggtgaagatttataatcccagaattccagaggctgaagcaggatttcaagttcaaggccaatttacactacataaacttcgggagaaacagcctagagcaaggttaagatttgccaggagggactagaaggcaggcagtgtccctgaggggtttgctgctggtggcctctgtggtggaggtacagcttcctgatggcctccacttatgcttcaacacctgactctacccacataggggcagagttatttgggggaaggatttggcttgactgtgtttctaggactgagtgccaatacaccggagactgagactgaaagacacaggtagcatgccaaccctttcctgggaagcgaaggtttttgctaatgtggccataatgactcgcatcatgtcatctgtgacctctgccagggtgtgtttctttctgtttatatctcattgctcatctgcccacccccttgactaacatatatttaaaatccttccacagacttcattacaatcaagtctaattgttcagcaagccgcctttcttaaggccaatcagctcatttgtgttaaaataattcccagagagtcatcttattccccagattcctgactcggcagctcatcacatcaccgttcccttcaggtaagaacaaaatgtctatttcctattgattgaaggcatcctgaaagattcagtgtctcataaatgcagacagctgagcatcatatttctgtagcaggcatatttctgaaatggatggagatacttctgtgacagccaaaagactggctggatggcagagcaggttcatgctgggcctgaacatatttacagccactgtgactcaattattcactgccagatggtctgtcagatcttgaaggaaactgaagagggagtattggaattaatgaatggtgcacagggcttaatgttcctttgtcgctcacactgtgggtagaaccataacatggtacagccggtgacagcaaaagaggaggagggaaaggcgtaccaagtgaaaatatttcaactgcatccattcagttagtgaacatttaattagtatttattgaccaccaactatctgtgtagttcagcactaacttgtagagatgcagttgagtaatgatcacagaagattatctgacctcatgaacctcatgatctcaaaattgtaatagagatttgataaccatcacagcatctagggtactgcactcctgctgtggtcgtggtgactctggtgtaccaaatgtcatgttgccagtcatagaaaagtctgtccaatatacagtcatatactgtaggatgagtttctgttctgcctggtcccacagccgctttagccccaaataaatacactgaagcttatattaactataaactgtttggccaatggctcaggcttcttttttttttttttaaatacttttctgctttttttccttttccttttatttatttattatgcatacaatattctgcttccatgtgtatctgcacaccagaagaggccaccagatctcataatggatggttgtgagccaccatgtggttgctgggaattgaactcaggacctctggaagagcagtcagtgctcttaacctctgaaccatctctccagccctggctcaggcttcttattggttagttctctcttaattattgacccatttctattaatctaaatatttccacatgattttatcttactggagaagggtccagcaggttattccttcagtggctacatggcatctctctcaagacttctctttgctcctttctccagaattcttgtcttgtagccccacctagacttcctgcccggctactggccaatcagtgtattattcatcaaccaataagagaaacatatatacagaaggacacccccatcaatatacagtgcaccctgcttgatattcagtgactatgctactggtctgtatttactatacattttattattactttagaacaaactcttattaaaataagtttatgtgcctaaaagatggctcagtgggtcatgtgttctgagagacacatctgtggtgctcaaggttttttttttttctttttgccaatttgacccaagctggagtcatccaggtagcagtccatgactgagggaagtcagggcaggaacctggaggcaggaactgaagcagagaagtcatataagcatgctgcttaatggcttgctcctcatggctagtttgacttggtttgttatacaacccagaacaaccagcccaggagaggtattgcccacagtgggctgggccttccacatcagtcattaatcaaaatgcttctcacaggccagtctgacggaggcattttctcagcagatgttctctcttcccagatgactccagcttgggtcaaattgacaatcaatcaatcaatcaatcaatcaatcaatcaatcaatcaatcaatcaaaaccctaaacaccacagatgtgtctctcagaacacaggaccgcttctttctacatgggggccttattgttagcttggtgcatgaaattgttccacaagcaaaaagtcagcattccagcccatgtaatagtaaatcttttaggtaaactaatatttctttttttgttgttttttttttgtttttttgttttgttttgttttttgagacagggtttctctgtgtagctttgtatcctatcctggcactgattctgtagacctggctggcctcaaactcacagacatctgcctgcctctgcctcctgagtgctgggattaaaggcatgcaccactactgcccggccataagctgatattttaatcagctgtgcctccatctattccacctaatataattttaatagctaaataaatgcatctgtaaaccagtcccttaaatgctttggaatggttatcaagtagagaggctggacaaactcttttctattctgtttgtagttctcagttatcaaggctatgcttaatgatgtttgcctttggacaatgtgtgtcatttataagtcttgtttaaatatcgaagtatcaagggaaacagggctactggcaatctcaggacatttccttgacttcttttgacttcagttcctaagattgtatagtgccttggtttcagtcctcaacaccacatgagatataccctcatctgacttcattgtccagaacatctatgtgcctttttgttttatgtctaggtcaaatattcctgtgatgacccatgtactatttccagtttcaatttatattgtgtctttccataaggatgagcattatgcagtttgtgcttagttgtgtgcgaatgtgggttcttgatgtataggggcgtggcattatgcataactataaacccctttatggaaatgaggatttattcactgttccaatgggctttaaatgagttacatccccaatccatatccccccccaaagtgagggtaatgttttataataattgcttttcttgcagtttttcacagaaagtaagggaggaacttgatggaaagaagttgagacagactgctttggggatccattaatgattttcattgctcacatataaattgtaacatgcaaactgagctctgtggagtggagttcacctatgggatagctccagttgctagttagcctcattgccaatattctttttttttctttttctttttagttcaaattaggaacaagcttgcttcacatgtcaatcccttctccctctccctcccctccccccacccttctccccaccctatccatcctccactccccaggcagggtagggccctcgacgtgaggtccccaaagtacaccacatcatcctaggccctcccccatgtgtacaggctgaaaaagcatcccttcacgtgggatgggctctcaaagtcccttcttacaccagggaaaaatactaatccactaccttgggccccctagagtgcagaggcctccttattgacatccatgttcaggggtctggatcagtcctgtgctggcctcccagacagcagtctggagtccatgtgctcccccttgttcaggccagctgtttctgtgggtttcaccagcctggtatcaacccctttgatcttcattcctccctttctgtaactaggttccagagttcagttcagtgtatgtctgtgggtgtctgcctctgcttccatcagccactggatgagggctctaggatggcataaaaagtagtcatcagtctcattataggggaaaggcatttagggtagcctctccacaattgcctagattgtcagttcgtgtcatccttgtaggtctctggaaatctccctagtgccagatctctcctcggacctataatggctccctctaatatggtatctctcatcctgttctaccctatttttccccaactcaatatttctgcacctccattcctctccaattctcctcctctcattctggcggctccctctcccctaccctcatgctcctaattggctcaggagttcctgccgcttccattcctggggtccatgcattttccccttagagtccttcttgtttcctagtttctttggtgaagaggattgtaggctggaaatcctttgctctatgtctaaaattcatatatgagtgagtaaatactatgtttgtctttttgtttctgggttacttcactcaggatagtttcttctagttccatccatttgcctgtgaatttcaagattccattgcttttttctgctgagtagcactccattgtataaatgtgccacattttctctatccattcttcagttgaggggtatctaggttgcttccaggttctggctattacaaataatgcttctatgaacatggttgaacatatgtccttattgtatggacatgcattatttgggtacatgcccaagagaggatttgctgaatcttgaagtagactgattcccatttttccgagaaactgccatattgatttccaaagtggtcttacaagtttgctctcccaccagcaatggaggagtgttcctttttctccacatcctctccagcatagattgtcactggtgtttttgattttagccattctggccggtgtaaaatggtagctcagagttgttttgggttgcatttctctgatggccaaggagtttgagcactttcttaagtgtctttcagccatttcagattcttctgttgagaattctctatgtagttctgcaccccactttttaatttcattgattggtgttttggtggctagcttcttgagttcattgtatattttggaaatcagcactctgtcagatgtggggttggtgaagatcttttcccattctgtgggctgtaattttgtctttcttactgtgtcctttgacttacacaagcttctcagtttcaggaggtcctatttattaattgtagatctcaatgtctgtgctactggtgtaatgttcaggaagccgtctcctgtgccaattccttcaagggtaactcccactttctcttctagaagattcaatgtggctggatttatgttgagatctttgatccatttgcacttaagttttgtgcatggtgacagatatggatctatctgcaatcttctgcatgtccgaatccatttgttgaagatgctatctttcttccattgtatagatttagcatctttgtcaaaaataaggtgttcataggtgtgtgggttaatatcagggatttcaatttgattccattggtctatctgtctatttttgtgccaataccaagcgatttcagaactctggctctatagtagagctttgaagtcagggatggtgatgcctccagaagatcctttattgtacagagttgttttggctatcctgggttttttgcttttccatataaagttgagtattgttctttcaagtctgtggagaactgtgttgggattttgatggggattgggttgaatctgtagattacttttggcaagattgccatttttctatgttaattctacctatccaagagcatgggagatctttccattttctggtatcttctttaatttctttctttaaagactcgaagtttttactgtacaggtctttcacttttttggttagtgttaccccaagatattttatgttgcttgtggatattgtgaagggtgatgtttctctgatttctttctcattgtgtttatcatctgtatatagtaggattactgatttttttgagttaattgtgtatcttgctactttgcaaatggtgtttatcagctgtagagttccctggtagagttttagggtcacttatgtagactatcatatcatctgcaaatagtgaaagtttgactttttcctttccaatttgtattcctttgatcccctttacttgtcttattgctctagctagaacttcaaggacaatattgaagagaaagggagagagtggacagccttgtcttgttcctgattttagaggaatcactttgagtttctctccatttgtttgatgttggctgttggtttggtgtatattggttttatcatgtttagacatgttcctgttattcctgttctctccaagatctttatcatgaaggaatgttggattttgtcaaaggctttttcagcatctagtgagatgatcatgtggtttttctttttcagtttgtttatatggtggattacattgatggattttcatatgttgaaccatccttgcatccctgggataaagcgtacttgatcatggtggatgatttttttctgatgtgttcttagatttgatttgccaatattttgttgagtatttttgcattgatgttcatgagggatattggtctgtagttctcttttttagttgtatctttgtgtggcttgggtatcaaagtaattgtagtctcgtaaaaagagtttggcaacatcccttctgcttctattgtgtggaacaatttgaggagtactggtattagctcttgtttgaatttctggtagaattctgcagtgaagccatctggccctgggctttttttggttgggaggcttttgatgactgcttctatttccttagagtttataggtgtgtttaagttgcttatctgttcttgatttaattttggtaagtgatatctatccagaaaattgtccatttcctttagatttttgaattttgtggagtacaggttttcaaagtacaacctgatgattctctggatttcctcagtgtccgttgttatatcccctttttcatttctgattttgttaattagcatgctctctctctgccttttggttagtttggatagaggtttgtctatctttttgatcttctcaaagaaccaactctttgtttcattgattctttgtaatgttttcctagtttctactttattgatttcagccctcagtttgattatttcctggcatctactcctctgtggtgagtttgcttctttttgctctaaagctttcagttcttctgtcaattctctagtgtgacttttctccagtttcttcatgtgggcacttagtgctatgaactttcctcttagcactgctttcagagtgtcccataagtttgggtatgttgtgtatacattctcattaaattctaggaagtctttaatgtctttttttttatttcttcctcaatccaggaatggtgcaattggttttattcaatatccacaagtttgtaggttttctgcaatttgtattgttgttgaattctaactttaaagcatggtgatctgataagatacaggtggttattttaattcttttgtatctatggatgtttgctttgttgccatgtatgtggtcaattttagagaaggttccatgtggcgctgagaagaaggtatattcttttgtgtttggatggaatgttatatagatgtctgttaatcccaatttcgtcataacttctcttagatcctttgtttctttgttaagtttctgtctggtggtcctgtctagtggtaaaagcagggtgttgacgtctcctactataagtgtgtgtggttttatgtgtagtttgagctttagtaatgtttcttttataaatgtgggtgccttcgtatttgaggcatagatgttcaggattgaggcttcatcttgatggacttttcctgtgatgaatatgaaatgcccttcttcatctcttttgattgattttagtttgaagtctactttgttagttattaagattgctacagcagcttgtttcttgggcccatttgattggaaaatcttttcccaaccctttattctgaggtaatgactgtctttgaagttgaggtgtgtttcttgtacacagcagaaggatggattctgtcttcatatccattctattatcctctatcttatctttttatgggcaggttaagaccattgacactgagggatattaatgtccattgattgttgtttcttgtttgttttggatttattgttggtggtgtcattgtgtgtgtattttgccttcctgtttcttttcatgtctgttaaaattggtttatctattgcctatgtttttgtgagtgtagttatcttcgttgggttgtagttttctttccagaactttctgtagtactggatttgtggatatgtattgtttaagtctggttttgtcatggaatatcttgtttttgtcatcattgccaatattcttatgaaggtctggctcatagattctcattaagtaatgagatggtggcttacacaagtgagtacaaaatagtttttcttattttctagtagcttggtcctgtgaagcaaatgaagaaggcccacaaaattgttttccttccatggttgagggcaaaccatggaaaaaggtaacctagtcttctctattgctgtgataaacaacgagaccaaaaatgggaagggaagaattcacttggcttccatgtcttgattgcagtctgccatttaatgaaatcagtgcaggacctcaagcaggaacagaagcaggaactatggaagaaagctgcttcttgcctcgttcatcttgtctttatatcccaccaggataacctgaccaggggtagcactgctcccagtgtgatggtccccccacactaaccattaatcaagaaaatgctcacacagccttgcctatgggcactctgatggaagcaattccttgattaaggttccttcttgctggatgattctagcttgtgttaagttgacaaaaccaaccatcacaaagatgtgtgatgtcattttatgtaagtgaattaaggaagagatctagcctcatacaaggtctggtgcaagaggcctcaaagaaatgaagaatccaaaatagtcttggctgcacactggaggtacctggagaacttgagaaaaatttactcccttaccttctctcggacttctggggccaccaatctgatgtggtctgaatactggcaattttaaaagaaacatgccttggtttggagggaattggtgagtccctctcacagttgccttcagatcttcacaggtgtgcatgtcgtcttcttcttgactgtgatgttggaagggctggggctgatccacgtgagataaaattttcattttggaatttttctcctagaagttacctgctgggtgttgggatatcatttgtgtgagagggaggggtgtgattttgtatgcaacaaatttcttctgagccttttgaagttccatgtcttacacatggctctccatactcagaaacttggcagcctttcctgacgatttgaacccaaatttacagtaaaaatagcactaactattagggttagtcaccaagaagaatgtagaagccagaagagagatcttggcctgattgtcctggatgagagtatgagttttatacatccctaggtttgggatttattgattctatagcagggtaaggaaatagaagcaattgggtaatggggcatgtccttctgtatgctgtaaatatatgtttctcttactggttgatgaataaagctgttttggctaatggacaggcaggatttagccatgagggaaatccaaacagggagagaaaggtagtaggcagagtcagggagatgccatgtagcaaccaaggaagcaagatgcttgggcatcactcgtaagccaagaccacgtggaggtacacagattaatagaaatgggttaataattaagacagagctagccaataagaagcctgagccatctgtcagtttataattaacataagcctcagtgtgtttatttgggactaaagggctacaggaccaggcagtacagaaacttccgtctacatttgggcatcattcactcatttatattttcattcaacaaccatctgctgtatcttctcaggcttggcagcataatggcaagtagagtatacagtccccatccttagtctaacaggagacagagaagtgagtgagcaatcgggctctgtgtgaacctgtggtaatgaggagtataggatactgtgagagatgagtatgggacctcaaaccacccccctcccagacctatcatccaggctggagagtggtgatagggaatgtctcatgggagaaaaatcactttggggaggaagtcagctgtgggatttggctatttgaactttgactatagaaaaaaaaatcttgctgttcaagacagtggcgttatctggtaacattcagatgttgggctctcaggactagcctcagctttcaggttgcagctgctgtgtcctttctatatcaccgtgcagacaacagagaaagcaataaaaggaaagggagaagaaggttagccaagtttgtaccccaatcattggagatctgggagaccactgtcggagaatgggcttctactcaaagtgatatggtcttaaaaaaaaaaagaaaagaaaaagaaaaatgtatccgctgtctgatgacacaaagtgatgatgtatggtatccatggccctcagcttttctacagctctccagctaatgatatgtggaccctctaggggactggcatctagctcagcaacactcctgctctgtgactcctagtctgacaaccttgggcagcttctgtgaagtagaaattcccaggaatctgaagactgcgtctgtgacaccagcagtgttaagtcctcatggatgagactatatcaatttttgtgccctgttgttttggaagtcagcaagtttcaaggttaagaagtacactggaggaaataccaaagacttgctagggtatcggggagaaggacctggtttttatcctgggccaaagtaacattcctacttacactgcaaattataactgccctctttaacttgcctcatctacctgtcagtggtattggtagatggccaaggaaaggccctgactgctgtgcatccccagagctaaaatctctgtcttctggagatttccacatagagcgacaagctgatcttagttgtagaggttcaaaagagggggaattttatttagaagaaattaattcctccataaaggaatgattttctgttcatagattttaaagattctgtttttcccactcactattctttctagggtttaattcctttcattacatcttagcgggtcttgagaaggcctgtgcttgatagcgtcttattaagttgcagacccaacatcaggcatgtctgtgcttggaagtctacttcctaatagattttgtagcacaaagacactctttttaaagccatgtggtgccaaggaatgccaatattcatgaggagaactctgttctagtctgtctctctcttccctactcaaatctctgagctgtacactctcaatcatccttggtcccaagttcatggtgaagacagtgacatggccattactaaccaagaaaataggtaagacctgacatgacaagttatgcatactaatgatgaatacacgtataagaatatttacattactactaataatgtagaaggggaaacagcatagaaggaaatgatcaaaatttccaacagttaaggtggcccacaatagccaattgatgaaatctgaatactatggattattgttataagcactcttgtcagactttctttggactgccaactggaaaatcatgactgggagacttagtattaactatggcctttagcttagacatattcccaactagctcctataacttaaattagcctgtttttattcatctattttctgccacatgggtggcttagttatctctcctctgtaccatatgcccaacttcttctttgtctcactggtgtctcctgcatgcctggattcatcctgagtgtctttttctgcccagaagtcccacccattctctcctgcctagctattggctattctgctctttattaaaccaatctcagtgacacatcttcacacagtataaacaaatattccataacaggctacctgtcactaaaaagtatttacatcataaaattcttgtatcaaaaaatcaaagaagcaagacatgtggtacatgcctgttcatctcaggacatgtgaggttgaggcaagaggatcttaagttggaggctaaccttggctacatagaaagttccagcctggcttgggctatctagaccctgcagcaaacaaaacaaaacataataaataaatgaatgtaaaaatcttcctgtttaaataagtccttacatttaaaaatgaaagcatctataaaggatagcatgttgtagaaacagcaacactttatttttgatagtacattgtggccagttttaatttcctgaaaatattttttctgtatttcctccaaatatttcctatttttccagactaaacacatggaatgccaagtaaaaataagttttgagaaaaataagtaaaaatgatgttaaaaatcacaaaattttttcctatagtataattttcacaaggaatttttttgagaaaaataatttttggaagtcacctagcattggtgttagcttttctttgtgataatatggtgtgctggcaataaaacattgatcatgaagttatgatttaaatgactaaaccatccatagttaaccttaggttcgggtctaccagtttaatgatattgtcttttctggtcaccatgactaaaactgtatattcacagccaatttaattccctggtataaactgccacatttataggacctgggttgcagatctcccccttttattgcaaattggtggtggtcgtgggataagactcattttgttaaagcaatagaaaagacaaaaggaaggaggcgagggcgcatcttaggacctgagatggcactgagaagattttaggaatgaataagaaactcctcatgtgttttataaacaaacacctcaagatgcgtgggcctatccacatcttctctttctattttaagtctttgtgggtgtttgtggttgtcttttctgcatctgcatcctttttcttcctccttcttcattatcgatagcaagcattttatgtgtttattcactgctatttctgagccatcattaagtctgagcccagtccctagcgttttacttatgtgacttactcaccatgatagaaaatagacacaggtattgtttttctttttcacttcacaaataagggaacaaacctgaagagctaatttttctgagactgttcatgctgcaaattatgaactaccttcataactcattctgaaaacacatccccatatgtttgaagctacatacatacatgccagtgacactgactgctttgtgagaggtgacatgctttactgccaaccatggagatagcacaagaacgcaaaccactttgtccacactctaagtaaattgtgacttatgttagagcctcaaactatcagggcaaagttttgaaacagtgcaagctttgggtattgcaggcattagaggaggggagagtgtgggaacagagaaagaatggaatatgggcttgtgaggacctggttcaggggaaaacttgagtgtgttggagcatcaacaccctgggagtgctttctggaggactcaggatccctcacccccatcttggaggctccctgaagggcaaattggacagtcacacctccccaggacaaagagggcagacactgggtgccgtgctgttaatggtgcacttgtagggagggagtcaggaagaacaaagcaaaagattgctgtgtcacagatcgctaggcctcttccatagcctctgtcttcaacacttagacctccatgtggaagcactctgtggtggctaatggaggagccccgcagggaatcagctctggggggagttagttaaagattcgaatctgtatgtttgcatcctaggtgacctagggagtccttgtcctttgaacttttcgagagtatggcttactagagggcattgtcttgtttaatctacctttgagtctccatcgagactgatgtggtaacgtgctcatagatacaaggtaaatgaaagatgactttccaagtttacactggagaacctcaagattatcatctcacaatcacagtcacactaattcccactgactgcttctcctggatttgctacagtggacctataattgtaatattcctcctttctttttcctccctccaaaaccttctatgtgttcctccctgctctccttcaaattcatggtctctttttcactaattgttattgcaagtatgtgtatataaacgtgtgtttgtgttatgtactcctaaatatgacttgttcttttcatataatgttatttgtgtgttttcggggcagactggtactgaacaacccactggtgtacccttccctagggaggacttcttctcctgctctttgtgttactcgggagcctttagttctttggacacaactgaggcttcctgtgctttttccaatctcttagtcaacttttaatccaaactcaaatctaatctgtttggttcagagtgtttcagaagatggctgaactgagcgcccaattgcagacacaatctgcctaccaaggataacctgctatttttgtatgttgttcgcctttatagttggcactattggtccttcctcagtagggggtatgtctcaagtaacctttgtgtagtagagtggaatgatctggtcagataggaagcaaaattgggtaagcagggcatggaaaggaccactgacatttcttagcagtcttttgcatttcttttttaaaatttttttttatttaaattagaaacaagattgttttatatgccaattccaattccctctccctcccctcctcccctgtccccccagtaacaccttacctatccaataccatttctgctccccagggagagtgaggccttctgtgggggggggggaatcttcagagtctgtcataccctttgggatagggcctagtccctcccctgtgtgtctaggttgagggagccctctatgtgaaatgggctcccaaagtccattccttccactagggataaggccccatgtatttccaaggcctcctcactgacacccacattcatggggtctggattctgcattccttatttgtttcttctaagtattaatgtagattaaaacctacttatgctttagaaattggcatcaaaagttatgatcactgagtcatgaccgggtaatgtcccgtgtatctgatttggctgtcaagcccaccattcttccattctgcaccagaaagaatcttacatcttacagatttgaggtagatgtttttggagaccagcaaaatttgaacgtgagtctcttcaagtccaactttttgcttttttcttctatgctataatccttcagtacccctcctagagggatgagaagatttgttatgtagcctgtttaccataaatggtcttatgaaaggcttgtacaaaaatctaaacaaatcatgaagactgcattctcgttttagaaatctttacttttaattgaatgtttttacttccagtatattctgatcatggttttcccccacccatatcctttattttactcctcagctacctcaaaaacttaataaagccagaaagattatcagtgcaagcctgtggctatctgagtccatttccaccccaaccagaagcaagtgcaaggtgcttcaagcaggatttacagaaggtaatttccaaaagagtcaaaaaatcaaggaattatgtcctttcagagttcatgagggtttttctaatgtatccttaaaatctctccagaagtctgaatacaacaaggtacagtgaatagagttgtataaaacactaatctatttaaataaaaaagggaaaagaagacactaatctattttaaacattaagaattattcttggcttgttgtggtggtacacactcttaatcccagaacttggaaggcagaggcaattggatctctgcaaatttgaggctagcttcgtctacataaggaatgctaagccaaccaatgctacaaagtgagaccctgaatcaaaaataaattaataaaatatttggaaatcattgaaatgcatctattgtaagacatcgacgcacacaggttcatagacgacataagaatgaatattcttggtaaagcatttgctaaccaagcgtgaggacttgaagtcaggacctacataaagcagatgtggcggtgtgctggctgcactaatcctggtgcttctattgtgaaacctgtgtaaaccgggcagagtcaggaccctcagaagctgggccagccctcttagcatctgcagttggaaataacaaaagatcctgtctcaaacaaggtggggagtgaggactgacacctgaggttgtggtcctatgacctccatatgtgtcacatgtgcctgtccaaatgtgtacacacacacacacacacacacacacacacacacacacacacacacacaccacatacacatacatctcacatacacacatcacacaaaaacacacacatcacatagacacacatcatgcacacacatctcatatatacacacatacacacacatcacatacacacacatcacacacacatatatcacacacaccacacacacatctcatatacacacacatacacacatcacaaacacacacatcacacatcatatatcacacacaccacacatacatacacacacacatcacacaagcacacacatcacatacacatacatacacacatatcacacataccacacacatatcacatacataaacacatcacacacaccacaaacacacagacacatatcacacaaacacacaaagaatataaaaggcttccagtgatatattgcctttaccttatcttcattcagttgagaccttcagtgatgctagattagatactgtaaactgtttgctgatttttttacacctcttccttagacaggtgcacttgtgagtgtgtgcatgtatacttacatgacttattttttaaataaaagcatgtcttgtatttcatttcatagtctacaacttatgctacacatagaattttgtgtccagcagtgagagttctattcttagtgggagacacactgcttctcttttatctttataaggattgtaaatggttgccatggcaattactcctatgttgaaagtattcaagtacagttttactttttttttttaaaggggggtacccaaagttttgatacagatgccggtttgttaattgacaaagaggtgatattcagaacacatggtaagttccaaacagcttaaggacagggaggtggcttctcgttttccttctctcaatgggtgtacacttcgtgatctgcatattataaaggacatgaaagtgaggtcaggcttggcaggaaaattgctggctacaagcttttaggacaattaagaaacaacaggatcattctggcacaagcttcaaccagttggcagggaaaaaaatgcctcttctgctcctccagtgactggtaattcaaagtaagtagctaaaattgcctttcatgtctgtggacagcttctttcctgaagctgtgagtcttgttgaattgtcattgacagtggagcatcttccttgttagagtaagtgtggcatctatagggatttatttcaacacccacagaacacttgcttgtgtccacagttagaagttcctgaatccttgctccagtctagaaatggaatttaccccttcccccaaaaaaaccttttcttctttcatcttttgttaccatatccagaagctatgaccttgttctgtatgattggtgacatcctaatgggcatttttgaaacattaaaaatagctcacagacccctgttattatcgttgctgaagtccaaggtcttgcaactccagttaggatattattaactatccctatttacttaaattataagctgtcaataaatagtacttttcttcatttgcagtttgtcctgaagcttcattgttgactattctcctactaccagtacctagccaggacagagccagtaagtgctttctggtttgtccctaacagcctgaagctgagacactgaactgtcagtgccccacattcaaggactctgcatccacagactcaaccagccaccaatgggggcataagttctgtctgtactggacatagacagtcttttttttccccactaactttctttttttaaaatttatttattagttctagttagggaacaagcttgtttcacatgtaagtcccttctccctctccctctcctcacccccatccctcctcccccatccccagtctacccccaccccatccacccaccactccccaggcagggtagggccctcaacagggggctctgcaaagtccaccaaatcttcctgtgctggtcctgggcccttccccatgtgtccagggccagagtgtaacccttcacatgggatgggctctcaaagtcccttcttacaccagggaaaaatactaatccaccaccagaggctccctggagtgcagaggcctccttattgacatccatgttcagggggctggatcagtcttagacagtctttttttttcttatcacttttacttcaacaatataagaattatttacatgacttctggactttgttaggtattataaataatccaaatgtgacttagcgtacactggaggatgtgtgtagattatatatagctgtaccgtttcacataagtgatagattgtccaaggtgtttggtatctgctggggcccgtggagtcaactgtctatgtacccatgtactgtatagtagaatgcttgggaactgtgatgcactgaattctagtagctcttcacatggccttcacttgaggcttccatacaacgtaggagcataactcagaaggctgctgagacgggcatcaatgacatgtattaaaagacactttcaacattttccaggccacaaagtgtccacgagtcccacatcttttccacctaaggccattgtctttgacttttgttgtcacaaagaagtcagcagctgtttgtgcaacggagggaggaaaccatctcctgctgttccctgagtcgtgacagaaacaaaaagggaaaagacaatgcaatttttgctcctctggcctccccatatttggtcaggtaagagcagggtttctgaaccaggttgtctgacagaccactcccagcttgcaccatgagcaagcctgcagacaccttaagtcttggttgcagtatctatgtgaagggggtgacaattgcccttgattacagggcttctgagtcatccaaagcagtgtagatagagggattacagaagtactctgggcagttagctgtccagaaaagtaaaatgccatctgagttggcttctgttgaacacctactatctgttcaccctatgtagaaagttctctaacagtagtccactggaaacaccgagtctccacttaactgggatccttaaggagactggacttggacaaacttaatgagaccatagtggttcttggggttagaggtgatggagctgaggtgtgactaagtcacaggctggtggtgtttcctctgtgagccatgtctatcttaaaaccctgaggattctgggaatcagatagaaagtaaggtagagggaccattagtcctcgccttcaggttttagaagcctcttaagtaatacttttataaccaacacttatgtaaacatacattttaaataatgaatcaatatagtatggctctgtttatattcacactctaatttcatggagttcttagcaaatctaaagggttctggtggtttacaaccagggggttttcctccctcttttcctttgattctaaaacagtaagttgactcctcttcttcggggaggactttctaagtcattagagacagcatccccgaccgatgatcctcaagtgacctttcgtgcagctcttctttcttcttcctggggatgagtcctgacatcattctccaggaacacaaaggactccccgagattgattcatcctgccgaaagtctgcaaagtgtctcttctctactgaccatgtcttaattcaaatattcaccgtgggggacacacgatgcctccctttttctacttttccttgaggttggcttttgaaaagtcagctattttagggacggcttggaaaactttattatccccattcacaaacgtggttttgtatcttttagccaatcatatctttcgttacttctgctcctttttttattcaaataggccagcatctgttccaggattcagtgccaaggtgccgcccagcttagaggaaggaatctttgatctttttcttttgcctcatcttggtaccaacacactagttaccgcctaaatccctccacattctcacgcctctctttgcagattcactcgggacttttttaaaaagaaaagaaaaatttcaatggaaagctaggaagcttattcatatagatgttgaatgaagacaaccccgagctgtgtaattgtgttctgtatgggtgtatgtgattgtgttctgtgtgggtgtggttagtggacagagatgaagcccatttagaagtgtgcaggagtagttttggctttggctcctcccctgtggtgggtccctcctaagtttcttagtttttagttgttttcagataggaataggaaaacaaacaaacaaacaaaaaaggtagttttcatgtcctgagcaaagtggtaggggccacttgtgtaggctaacgggaatgcagttaatgccacaggagaggggcttgggaggtttacttcccagtgccccctgcaatgttcacagtgacttcgctttacatctgggtgcatacaggtcctcttttacatggcttttacagtttgccacttgactgaagacagctcttgtcatttgtttatgaaagtattttactgatgtctggcacatggtggggtttctgaattctaaatgcccatttcagacattggttaagtaagaattgtgtaatatgttagagggagtcacagaacagttcttaaactgttgaaaagaactttttaatcattgggtcattcagtcaatgaacactgatttgtcatctcccccgtgtcaggtactgacttatgtggcccaatagtactgcctcggggaaaacagacacaggcattctcaggcatcagagcccacctgatggctttcatgatggtgacagtcccttgacagtagatatgaagctactcacttgcctagaagttatgggaaagaccaccagaagacaaaaagatgtaagattctgtgattctcatgggcatttcctcccctggttactccccgaagcacttggctcgttaacccatagctatgaacctgataaactcatccatcctataatgcagacttatgtggccagtgtaaaataagaacagctaactactgcctatggttaaatcttatctgctgtctgtgccatgtgacctctgtgcttaggacaatttttacatttgaaaattcttggaaaacaaaaataatgattttggggagataagattatgagattttaatgtctgagaataaagttttattggcacacagcctggcctagtgtggatggctgtactacgtgtggctgtttttgagctgacatgggatgtagaaactgtgctgacagcaagggttagaagttattatctggctttttaaaaatttgatattctctgactttttaaagaaggatttttctaaccactgctctagaagaccgaggtgctacgacttcatgtgtttgccaagccatcagctgaattcttgggagacagaatggcctcagttagttgcccgtcataccctgacattcaaggttgaggcctaggaaccaccgagggtggcccgtttctaagcacctttgaactttcttcagtcacggagtgtccaagaaataggcaatgttctttttcttaatgtaacttaattcatttcctaccggatactgcagttatttccagaaaattatgctttcttgcccttttaccttaaaatatagataaatctagtggctggagaggtggcctagtgggtaagagcatataacgggctcttgcagaggactagggtttagttcccagtacttatatcaagagactcacaaccagaggagctgacacctttttctaccctcctatcctaaccctaaccctagccctagccctgcactcatgtgcgcatcccccatgcatgcgtaactcaaaacaaatgtcatttaaaaaaactactatgtgggcagcctacatggtgttctgatgagggctgcctcgcttaagatatgtcctgcctctgatcactggcagtctggagtgctatggttctgcctactcttgctgctttttgttgtaaagccgttttgttgcttcccacaaacacctggggctctctgtgttgcattatccttgaactcatcagatgtgtggaaacactcctgtgtttcctccagggcctctcaaatatagtagaccagtctgtacttccctggtccaacattctaagacctgagctatctgacaccattcctttctccacgatgccaactagcttctcaaactaggaaatgcccatgagccccctgtcatttcaccagagtggcatcttgtctcttgagtcagaggaatagaatgcttctttgggagctgaggtctgaggaactgggagctagctggcggtgctccactgacctttcacaaaaggagacaatttgacatttccagttctatgcaagctccaggcagccccagtccaacctattggtgctgttgtattcaacaacctcaggttctggttagccagatggaaaaaacatccctggaaaaacaacaacatgaaaacccaaggcagagaaagccattccccacccccactccccaaaatctaagtacactaaatgtattgaaggacttgccaggaaaacgcaattttcagttttctctgtggttcaatttatcttcactgctctgtagtcagtttgaattagatccagaagcagatacaattcaaccctttctctttgaagacaacaacccccaccttcctgtcagcggcctcgctgtcctgtcccaaggactggtgttttcccatgttaggaactgctgcactgcttcctgtgagacatctgaactgggcaccacttgtttctcttctccaatacatgaagtattgcatcttttttgctatgcctcactagagacaaggaacagttacttgggattgcattttacttcactgaatttgcattgtgaagagggcaatttgtctgctgctccagatcaaccttggcccgagctctgcctcatctattgcagcttggctttctgaaagatacaagatggaataaagtgtaaggaaggacatagctgtctcaacagctgagtggtcaagttcaccttagtgccaaggatggacttggagtaggcaccagaagacctacacaggattatgtgggaaatcaaacacacaaaacatttcctgtgcttctgctggcaagaatcatggtgtctagcccccctccaaagataggagtgggataaaagaggggagtccaggtacattcatctccaaatagtaaagtagaaactgattgctacttttcatatggaaatgacttctttctccacactgattgtccaaatgaggacaggtgtctaatggcggatctttttgagccagtatgatggaaatctttctttaaactcccgcagacagccaacctttaattacagtctctaatgtgcctcctccaagaggttcaccatgaatccctttcccttaagcagaaaccagacttagtaatttatttctaataaacagaagtaacagaggcataggtcagttagtacagtattccctagcatgcgtgcattggatctacaacactggataaaaccatcattttatccagtggtgtacatgtgtaattacatgcggtgtacacttagtacacttaggaggtggagacaggacatcagaagtgtgtcatctttggccaaattcaagcccttccccctttagctggaatacagctagaggctgtaccaacggtttctggtttgttctcattagcatcactcactctataaaaagccagtgtcatgtcataagaacttttgggcattgctatggtgaagcttatgtgtgaagatgtggggcttccatccactagcacatgggtggacaatgttcaatgaagaccactccgcacaatccttcagatgccgtagtccctccctatgagtagccttgagagaaagccactaagctaagttgctcacacattgctgaccctctggagcttcgaggagagtgtttattgttttaagatactaacttgtggagtgattttctatgcagcaataaataacaaagttctctttgaagactacatcacgtgtggtgaaagttttattctgcatgcaatttatgatgtgcacctttatgtttaatggttattattagctattaagtttggattacaataactaacacattttcacaatgagtaggggtggtaggtgaccacataagggtactcctgagctatttgaatgtggccagacatgttcttgtatactcgagagggtatattctagagttttcccgtatgggtaccttgcgtggctaaagaggaagtgaggtctccgattactaatctcacttcattgtagtagcagcattcagaggacactgtaacagctttaaaacacataaacaaattcttaccatggagagccgaagtctcaggcaccaaacctggagtctgggccaatataattacttgcttatagccagtatatggcttggtatgcagcttcggatgccgtgccagacaatagccagtatcaatcgccagatacctgagtaaaaacagctacttttgccccaaacatcaagtgactcccaattgtcaggtgatcccaggctgagtcttctaatatgaagcctcaaatgtcagagacaaagatcccactatattctgtctatattcttggcccacagcaactatgactatgataccgttattgttcaatgcgactaaaacttggatagtttattacatagcatctgcaaccagaaacagtttattcattcacctttcagattagttgaaaacaatttagttcagtaataacaactaactaaccgactgagtttaagctcttaactttaaaaaacttaacttcagttaacagtcgtgacatgagggaccaagagacactatagtctttgatctactgtttcaatgttataaattttaaatcttttgaagagatcattgaataattagcacattaggctcattgaataactcagagataaatgaataaatgcacattttatccttgaacattcccccagatagactttaaaaatatttttaaatgtatgtggtgtataggtgttttgcctgcatgtctgtctgtacacatgtacatacagtgcccatggaggccagaatagggcatcatatcccccagagctggagttacagatggttgttagttagcatctaaggaataaggtatagaatccatttagagtttcttctacccttttcccggttccaagtcttcctgtgccgaaggtggggtgaggttagccatcaacattgtgatgttaatatttccccttggcccttgcctcttcattgtgtttagaataactaactccatgagttaccttgtaattgcatttattaagagcctgttgtattgatgttgtcataaataagtaatttgatctgattaagatttggtagacagacgtttgctctggatgcctaatggatgtacacttgtaggacgaatgctctccatctggtggtaaaaagatggtacggtaggtgggcttgtgtctgatgcacaggactgatcctgcagaaagtcacttcctggacaggactgcggtctccaagaggaagacacaggtgaacagcagtagacagtggctcacttacaggatgttccagtccacagaatatttatcatgttctcagaaacagtgtgaaagacatatacggaagcccagaaaagataacacacctgtccgggtcacacagttagtgagtggcagagcagcagcccaaacacttatctatctggcttcgaagctcttagtctctaaatagcacagttcttaaaagcatgttatagaaaggccacatatccaagagtatatgagcagcataaaccatgcttgatgggttaaaaaagagagagagaggatacaatgaggggtggagagcagaggggaggggagacagatcttgaaggaggctagagaaggggtaaatgtgatcaaaatacattgtgtgaaattctcaaagaacaaataaaaaatgaaataagaagaaaatatacaggtttcttatgaagcaaaatgtaaactttgatgaactgtaaggattaaagaatgttcagatagattgaatttgttccttggattgtcttacaactttaattccagaaatgtctgcattttggaggtcctatgatccctagagaaccaaaagaagcttgcttgggagtggccttctagcacagagcagaggagggctctgaaggagtaatgtggtacaaaaaaaaaaaacaaaaaacaaaaaaaacaaaacaaacaaacaaaaaaactgacagccatggcacaaaaaaaaaaaatgattacatctgggtcaactgggctcccactgacagaccagacacccagtttagtcatggctatgcctactctttccttcatgagagatgtaccctagaaagaaaagtaccccgaggaaggtgagcaattaatagagcatccattggatctccctttaaggcattccaaacctgctcttttgtactcctgctcttattagtcttccaaattagaaatcttagtgttatccacttactttctgtgatggactagaatcccatcttgatttctactgcttgtcttattggtcccctgatcttagtttgggggaggaagatataggtgtgctggcaaatgaaaagcccagaaggcatgagcctattgggaaagtaactttctagatggaagtgcatacataattaatttgggagtggtttagacaaagaaagcaggagaacatagcgggctgatggggagaacatgggaagacaaggtcagagaagagactttggaaggcctgcttagatcggtagtgttttctgctaagagcagttgggagttgtttgagggttttagttagtggaaaagggccatatgacaaggtatgatttcattttcagaacatccccctggcagtgatgatgaattctgggtgtcagaatggaagcatgctgtgagggtaggctcttttgttgctgaagaggagaaagatggtggtttggatgatagttatggtggggacagacaagaggagagactttggtctgtaggccgtgtctacagggcccaaatctgttagcatcttctgatagtgccgagtccaactccctcatgttacagataagaaaatagagctttggagagtgatgttaagtcaagacctgtggacagagagccaccagcctgatgtgggctcttgcttcctgttggactgcagtactttctataagttttacgtgtataccttcatttctttcacttcctcaaagtggagaagttgccttctacacgaatgactgacttccattttacaaagggttttgacaagctgggtagaggaggacaggattctccagctcagggtcactctactcccagtgcatagaggaaaatcctacgcacttgttagattaaataaagttgaatggaggagttccaactgacataaagcagcatcccattgagatgcagactctgagggaaagtttagaatcttgcttcagagaagggaaaattcctggaggagatccatttcagttcttaatgtgggttagaaggctgttggggtgaaaggcagcagcccttgcagggcctgtgccacatggcctcaaaaccaagagcatttgcatactcctctgagctctaaaccctgtgaaagagtgacttagctaaatgtccacctgtgttcatgggccacagagactggaaggaagggcaatgacatgccacacagcccctagggactttctctttccatttatgtctccacaaaagtaaaatggcactggctgaacgttccttttaggagatggttttactcagaggaagatggagcaccacatggcagcttagatgaaagccaaccaagggactggtttcacaggtcagttctagcttaggcttcaggctaaaataaaggaaagcaagagactttgagtatccatgtcatttgacccaatacactaaagcaaaggaccctaaaaagattaagttcataatcagatatataggacagccaaggattgcatcataactggaataaagaatgtccgttaacctcaaccacctcctatattatctcattcaggaggcgagcttgactgaaccaccgttgggtgtgctgattcagtccaggtaagggaaccctttccatctgctacagttggcaggatccaacctagccatctgcaaaactctaataaaacaaagatgccacttggttccatagcgcatgccaaacacctgtgtctgtttttaaccatgagactattggaaattggctttagattgtactaatgacaaatgagtatgaaatcagtccttgtactccacagccagcgtttcttcagggatgtgcagtgtcggtaggagtttctttggtttgtttagttgactgcgctcttggcttcatgctgtgtccttctcactccctctatctggcatctgacaccttgttgctgagagtaggtttcctggggttccccaatcagatttaccactgatattcagtgctgctgaatcactgttcctttattgtccattgagtccataaatccttctacttctttggaacattgacctttgactctaaaggaaaatagacaactgagccaaatcatgggataagttagatggcttatgtgttaatttgtctgtttcccaaatggacaaatctttgaatccatgggatgttgtagggacaagtgacacacctcagcacttgaagtcatatgtgcttttgtcccattgtccttatttcagtttgtaactatgtaattgcttagtaacagactgatttctattttattttcaattaaatgacagaattaagaaaataaggcctgtgtctattaggatctctgactaaaacacaatgactatctatctctagggagactagtggcacatagtctctgtcaggggataaatgaactagtttaaaaaatagatcaaaataaaacatttttcttaccaactctgaagcacaaaagtgaaaaataagacaacagtatcaaaaactacagatgagactgtctcagaaaaattaaggtgtataaagagccacagaatgcccagtgttttgttcagaaatgcagtactgcatacacatttctttaaattcaaaaagaagaggtttcattggggctggcaggtaggtctcaagaaagtaagccccgattactgagttccctatattggcaggggaccactcctcagatgagaaaaatcaatagttgccattctttcccacctccatcattccatcgttcctgccctggtaagaagaaatccccagcccgagccccatgttttccactctccctgactcttcttatcacccaccattctcatgtccatcctctctcaaacagacctctctctaaggcctgctccctgctggatattcctgggtggagaacacatgattgggatgctgtctataaaactgcctggttttacacaagactcagtctgtgcccagggcagccctcgctctgcttgcatttctgtgaaaatgagttctaggtaggagcactgggtactcaaataataggcactccgaacctgccaccgtgtttgtgtctcccttcatagatcattaaaataccgatgaaccgtagctggacagcaagagcagcttaagaagagaaagtaaaatatttgtaaataattaaaatgtaaaacagtgacccaggactagagatgggcacatgtaagtgttaatagaggcaacacattctaaatggaagacttcaggagggctatttaccctgaaagcatagctcaggtgccttttttgatagggttctgctgttgctatggaaattgtctctgtaggaatgtgcacaaatgtgggatagattgctagtggcgtgaataaggaggtgtgggcaggggcaggcatgttgacactcgtcagtctccagccttggtcctgaagagactggcacagagtggagcaagggtgatgggaaggtaccaccatgggtagctcaggtttgtctgagagatcccaggacctaggctccccagatctacactctgctacctagagtgacctattatggttgttatctcattgtccccatgaatagcatgctcttttgctgtcaatattatcctgatttgattggtcatagagtcccatagtcactgcagaatgtaatttcccctagaaaatgagaaaaacacattgaatcaatcctgtagacctttcataatttcccactctccaacacacacacacacacacacacacacacacacacacacacacacacagagagagagagagagagagagaggagtggggtgaggtagggggtagggggagagagaaaaggaaccattgcttccttctcataaactctttactctcatcacaatcccagcttaacaaccgtacttatacacagccaggagaaggaacgagtcatgttttatagtgtcacaagttgtattgagtcatggaatgggaggtgggctatgttcgctgtcttgggaagtgactagcttttacaaggcagccttccaggttatacattccaaacttgtgcttcaggcaaaagagtaaatgagtgcccacggtgaattcaaggagagcatatcactcacggttcctgctagaaggactctacatgtgagaatgtgctgagagaacacagaatcattgtggcaggatggagggacaggcacagaacaggaatagaaacaaagaaaacctgttcagacaaatctcagctttgaccaatgtcctgggagctggctgctttagatatcactgcccttgctaagaggcactgatgcctctgccacctctctgtgtgaacccacccctaatatttgttgctgctgtgactgctaccaattgatggagattccatgccttctccttctgtcctagttagctttgggttcttggtacgaggtatatattggacaaactgcctttgggtgcctaaaccctagcagaaagcaagtctggaagagtgaaaaacagctcctatgaggttctacaaaagaaactgagttttgcctctcactaagttcgcaaacataatgttgtggtttggatgtgaaaggtctcccacaggctcttctgtttgcacacttggtcctcagatggtggcgatgtttatgaaggttgtggaaccttttgggagatggagcctagctggaaggaagtgggccctgggaggcaggagtgggctttaaggcatagagagcagtcctacttcctgtttatgctctgattccagagtgcaggtgaccagctagcttcctgttgctgctgtgaccataatggaacgatccccttcaactgtaagccaggggaactctttcctctttaaatcgcctcttttcatgtatttagtcacagtaatgagaaaagtaacaaaagcacataggaaagaatttcaaatgttctcagcctaaaaatatatttacaacaaacacagttaagtattgtcaaagacctttctgtgtacctttaaaaataagatctctaacagtctgtggtgaataaaaatcaaatatgtcaaaataaagctttaaagcatggctgtctgactgctttagaagacaagataacttttagttatccatgagtctgggtctaatgtcaaaagaataaaaggaaagggagaaggaagggcaatggctagaattagagaaggatcagggagagtttgaggttttgatggaagaagggtattcactagacttgcactaccatctgccagaaattacaagcctctacagaaaatggatgtaggaggatggcaaagtattgagccaagagacccaaagttccgacgacaaacaggagaaaaatgtgagcccacctaccccaatctagaaggatgccatgatgaatttagggccacaagaaagtggtagcctctaggaatattgaatcttgaatggctgagtcagattgactccagaactccttgaggaacaaggagacacatggaggcaaaataaacaatcaaggtcattgagttcttggccattggtctggcagctgtcagagtaagaaaatctgccagagtgtcatgctggctgctaatgatgggaaccaatgttagccagctgaagcaaaaggagactatgcttaggggtcaggggtaccccactgccaatgaagagaagggtaactggtccccaaagattgaatgtccccagtgtcctcggtctctgtctctcgtccctgcttgtctctgaagagatctgtgtcactgccttgactgaggtccagcatcctcatcacagtggacatcaggatttttcatggagccatggtctcacagtctcatgctccctatgtatttttcaggaggcctgagcctcttccaacttcagtttcttagagacaatctggtgagcctggcctactcaggtggggtgtttacgtgtcatttttgaatcattttaagggaaggctccttcctagttatagtcaaactgctgaagttttcacttaccccttaggttacggtttaaaaagcagcgtcctgatggatccaacctatcctagttagggttcctattgctgtgagaaaccaccatgaccatggcatctcttaaaggaaaacatttaattggggctggcttacagctcagagtttggtccattaacgtcttggcagggagcacggcagcatgcaggcaggcatgatgctggagaggtagctgagagttctacatctggattggcaggcaacaggaagtgagtaagccacggggtatagcttgagcttctgaaaccttaaagcccatctccagtgacacacttctgccaacaaacccataggtcctaatcctttcaaataatgccactccccatgagtctatgggggccattttcattcaaaccaccacacagccaataaagccctgctaaatagcatcccaacactcagcatggatcctgtgcttaccttaataaatgagctaagcttgaggacctggggcagggacaaccggcaccaagtccccctgagtgtgaaaggtcatggtgttggtacttaagggtggtcaaactcctctttcaatgctccctctgtgcagctgtctgattgggactggccaaaataaagcaaccttctctcttttcatgtcagtatgcactcctggataatgtatcccaggccacttgcaagtccacactaggaaagctaaaagggcagtctgtgttgatggtccatgcagctgccatggggaattctgaaggaaccaactctatgatggaatcatttggatatttgccaacaggaccagaccttggagtgttaaggaagtgagagtgcatgtaactgggcttatgccttctagtggcagctccgtcccccagcctggcctggatttactgaactctatcctgaaacctaaagagaatcctgatggtgttatgtttgtagttcaagagcaaaagagaactgggtaattggaaaaagacagaaagagggtcctggaaaactgtaatagagtttatccctttctgttcctgggagctgagattggcatctacctgttaaatcacaggtacagaacattttgtatgaagctttgtttcccggacccaattaaatccatgttcctcctggttccttctgagtctctcacgtctctaatgagtcatggactggcagccttcttctaaggaaaagtgaagtcacacaagcagacccaactgccgtttgctacctccttgcgaaagcaactgcctcatctttttctatttctactttgactcaagtccctcactttggacacgatcttattgggaggaaaaaaaaatatctatccgtttagggatatatgtcaacatgtcaactgctttgtcacattctttgctaatgccagtgtcatccgaattgaaaaagctgaagcaagagcgtgcgttttggaatggaggccacgtgagcaggcagggcagacagccagaaccttggctgcagaatgaaaatggagctggggtggagagcatttaaatccctttacagttctcatctcctcccccacctttcccagcccctgtggcccactggaacaaagggggtgtcatatttcctgggcacactgcctgctaccactcttccccccagtctttttttttctttctttcttgagagcagttttatgttcgtagccaagatataaggaaggcacgcagatttctttcccaaatagccccctcgtcctgcatgtgcgctgtccgcctccacttctgcaccgactcaccaagatcacctgtgctttacgcagttttgtgtgttttgaagaaatatacaggaacatagatctaactataccgttctatagaataccaacactgtctacccatcccccctcttccctcttgacccctggcaggggctgtccaatgttttcataccgtgatctttttaggagtaggtcattgtgcagccttttcatttcgctgacgcatttcttgcccctacatcatctcctagctctatgggtcacttctggccaccatacttccagcatcagcatcatgctcatacttcctgcttccctgcgcccacccctccataatgcatgcattctagaatcatttccttgccatcaacgtcccgtctgggtgacagaaatcaggtgacacaccaccaacatttaaccatcttgcttcccccattgacttcctggtacccagtatcctgcttgggcttcaagacttcctgtttgaaaacagaatgtgttgcggtggctaccttgtgatgtacattttgaaatttctttctaagtagacattagcaatgaattcagtgtgtagggtcacaaatctatgcatactgcctgcacttgtttttacttgggctctttttcatattaacagtggttgttaaggctaagaatccattcatctcggagatgtttacatcagaaaaagtacagaagctgttctcagaagcccacattgcagaacagtcagctgcagcgtgtgaagaagcgatttcatttccatggcagccagagtccagacgctcgagctttatagattaaaatcaatgcctgaattgcattcacaaagcctgaattgcctgtcagacttcaggaccagccgcacaacgtgataaatgaggtgaagagccctgtccaggcctgggagtgtgtgctgcattagtgaagactttggtttctttttcaaagcaaataccaaatggaatgaattactgggaaacagcaaatgaacgtcaagaacttgagatgcggggttataatttactaattactgggaaatgatgaacacagagtctgggtgtgaaagaatgtagctggggagaaagggtggatggcagatacaaagaaaggaagtctcgtggaaggctcctgttatccgtttttgagcaaatcaccttggtcagtctgtgtcatcaatcgtaatcagcattaagtaagtgtgtaaacacctaggctagaatataggtacacaagaggcagtcaataaacgtgcctacctcttcccagcttctgttcaatttcttttcttattcagtgctgagttattctgtgatgcctcccatggcagatcaatatgtaaagactgtgaagtgaggaccaagccctgagcatccacagaggcgctttcacaaagactgattttgtcatacaattgctgaaaatgtaagtgtgattcttccctctgcctgttagcacacaggtgtcagatagacaaaaatgaccccccccccaggctcattcttcaggatctttacctcttttggaggggtgctaacgaatttcccaatgtctagtgggagtttggcaaatcagtcttaactaggtgttctgaccagggcttctgctcctaagggacaagatgaggactcccctggggtctccattctaccactgggcataaggttagcatctgaggaagaattgtgtagtgattggacaagaccttgaaagggaacctagatatttggatgcgtatcttggtttgcccaacaacaaacttgcaaggaaggagtcagaggcaccatcatcagacccaaatcatcgaatgtcgttaagaggttgttttggaaagagctcaaaactccatatacccactctctcaatcttttcccaaacatacttgatgcactcagaaggaggacggcatcgtctagtcatttgtacgtgtgattcagtttttgcttcctttgccatgtgatgaggtttctggtaaagatgtagaaatgtaaagcagtgagcacagcctgttgcacttgtctttggaaaggacggtgtgtatgtcctcggctcctttccacatcctgttatgtgtccatagtggttggagctagtcatatcaccctggagacggatgtgaacatccccagagtctgggttcctgcagtctctagtgaacacacaaatcttagtctgtttagatttcttcataaggaaagaggaaaatgctactgttactcttgatgttttagtaaccaaaactggaacttgatctaaaccaatagagggcaagctcaaggagcgctgtacctcacactcacagagccttcttaaaaacagatttgcaacagagggactggagcaattgctcagagcaggtcttgccactctttagaggactggagtggctcacaaccacctgtaacttcagctctggcggatccaataccctcctctggcttctgtggggatctgcacatctgtgtgcatacactcacagacacatagtacctgaataaataaacataagtaaatcatggggaggggggatttgcaacacagcctagcacactgagatttaataagctctttgtgaagaaatagaatgtcttgcgtaaacctcttcccaaggctggtatttcgcaggtccttgcagttccaagcatgctctaagggtcctccgggagctcgttagaaatatggactcttgggcaactcatgcctgctgagtcagaattcgtgttttaaacaaggtccccaagtgacttgtctgctcttgagtttgaggaacattgcctgagatgacaatagtgtcctgtagttccagatcctggaacactatgctggcaaaggctcctcctggagtccctagagcagagggactccttatagggccagtgtggctgtaagctcttcggttcttaggctgctgttgtggacctatgagtgccatccacagcttcagttctaagtgttgaatccttttcagggccaattcattttattttattttatttttggcatcactgtctgacccaacagtctgtggcaggcttccttttcttctacttctaggagatcttaaggggtccccatgctactacagagcccgagtcttaataatgcttctcttggcaggttacacctgcatctagcagggaggtaagactggtctcccaggagacctacctgctggggctgcaaaacaactgtcagtcatttccaattacacacaagctcacacatgggatccagagctagccaatcaaaacagcacttggattaggtcatattgtctgtgaaatggtacctgactggagtaattccctttgccttttgctttctggtttatccagagatagaaagttaggggctgtgctgggtgatggcaagtatctttgtctcttgaaacaggttttctggattaggattcaagttcatcccatgtctgttgcaaggtttcaatcaaaccttaattttctcgtctttaaaaggaagaataaaatggtatctccttcccagatttgttatgagggttatacaaggaatatatggaggcaagtagccggtatttggtatataagaaatactatgtaactataaggaaaaatatcacacacacacacacacacacacacacacacacacacacacgtacatatatatgcccaaaccccataagcaacaaattattagtattttctgtatatcataatttagggaattaaaatccaaataatgtgggcaaaaatctaaaatgagaaaaagaaatctaaaattatacaaattgacaaggtttcccagcctgcttctctcatggagaattaatagtggtttgtcttattaaattagggcaggagtctgagcacacttggagtgaatcagcctccactgagcaccaagaagggaggtagctggggcacacaatgatgcagcaaacgagactcctgttccacgatagacgggagaaggaagacgacaactcaaagacgtcatcaaaagacaaacagagaaactgacacatgatgctctataaaagcagagaagcacacaaaaatcaccacaaatggctctaccagaaattatatatgtacttgaacatgaatagtctcttttgatattcacaacaagcctttgctgactatctgaataattattatcccagatatcactagatggagcttccaagacatcaaaataatgaagatcaactgggttctcatgcctgatacaagaaagagctaggatttgaactcaggcctggctcttgccagagtctttgattttactgtctcagtagagtcaactgtggtgagccacagacactttaaggagaaggtgacatttctacttagccttcaaagatgaatatggagcaaggcagatgggctcaacagcagacctggattggcccaatgcagaggtagacgagctggctggaaacacgaggacagtacagatttaaaaggaagaaagaaaggaaagagggatggatggagggagagaaaggaaggggaaggaaggaagaaaggagggaaggaaggaaggaagacttgtgaagtagatgggacagtgataaggtcatatggcatctgatcctgaattagagtctgagtctgaggagagaatgttaaggactcggggtgtccagcacacacacttatgtcaagacattcaaagtctataagtacagtaactatgtctgctttgtatacagaatatacaccataaatgtttatgaccaatttaattatgtatttagataatgctatttttgtgacgttcaaaaatagaattgattgtatatgtgtgtgcatatatgcatgtatgtgtaggtcagtggttggtgttgagtgtcttcctcagttgctctctcctattgttttttgagacaaggtctcttgctgaacatgggacttaatatttctgctagcctggctggccagcaagccccaggcatccacaatgggaatgcaagcacatacaagcgatgcctgacttttatgtgaggggtggaaacacaagttcatgtcctcatgcttgtatggcaagcactttattaagtgagccagctcccaaattttaatttttaataaatgtacatgagtgtgatgcttcataggttggttcactgctgtctttcctattgtttaaaaattcagatgggacattgaaaacctaaagcaaaacaaagcaaagcaaacactccctggtactgcaaaacctgaagagcctggccctccagaagatgagttttcaaactctgcaaggtagccctgtccccaggaaacatgagctcaaagctagcggttgagagagccaactctggttctttgggaggtggaagagaatgatatgagagactggcagtggagccaactaaaattgaaaaaagtcacatttcacctggagattatgggacagtgaattttcaatctggttgcatcccctgtttagttgtcacttgcttcgagggagatggacacattacctgggccttattcataggcctgcttctgaaacatctccaatttaaatgggcagaaccactttctctatttctggtgatttcccagtgcagagccttgctgtctgccagggctgctgggaaggggggagctggaggagtaaggatgcttaaataaaaacagttctatttttggcacactttaatgacaatcctgtctaagaaatatttttcctacaatgccttttccattcagtgtcattgaaagtgtttttaatttcaaagagaggctgttgcatgggatgttaatcaatgaactgctggcatgcttttctgtgaatgtggttcatttttttttttttttatatttaccagtgacaaagatgatttcttcagctcaggcaatgttaccattcatgcctggctaataaaggaagaaagaaatgcctgaggagctcgccctgatggtggaggggaggaggagggcctattttaggtacttgggatattttattgtcttcaggccttccctgtgagtcacaggacagaaatttgaggcagaaatgcatctgcgtctgagctgaaaaccgtttgggccacaatgccagagaaatgtgtatgcattccttgcttgtaggttctggcttccctgctctgtatgcaggaattcaacatgtgacgtctgcctgttcctttaaattcttatagttgtgtgttgtcaaaatttagggtggggtcatcttagggtcattttagccccaataaaggtctgttttattaaaagccctctggtccctggcctgtttactgctgccctgagacaacacttcctttatctctttctggctcactcccaaagaaaacagggagacttgctgcggcttggagtccagtttccatctccaggctgggtttgtggggtttcgtggctcaaaatgagcacgcatcagagcacagcatggaggattgaatttcatcctgctccacactcccagtgtttaaaaagaaatgatgatgcttctgacttgctctgttgagcagtttcttctacatcttttaaatgggagctctacgatgtcaatcaaacattccccctcccttctggcgagcacacaacttacgttacagttgacggaaccaaattaaacctttctggccttatatgctgatcgtctcaggtattttgccacagtggtaatctgactaacaccttcctggaagctatatcttgcttttacttagaggcagccaatccaatctgaagttcaagtaaaaatgaaagctgtgaatgcagaaaggggttccctgggaaatgtagctcctcggaacttatcaatggaagctgagttttagatgaattcttaccgtgttctcactcatgtatctggccttgacagtcactaatctaacatgctaggtcaaccataagtggaccaccttccttcctgtccatgtagcttgtttgctaaagaagagagagatgaatacatgctggctggaactcatggggatctaaaagtgggactagagagagcaaggcggacatgtttagggctgggggttggagtagatgggagctggggtggctggagatgtgtgggagaatcatcaccctgaggtgatgaaggtaagagagagagagagaacacagcctggaaaaggaaggctgccaaggaaagaacagaggagccatgagctctagagggtcccgcaaacatctatcagtctctacctctctgtcaggtgagacccagagtcatgagagaagtgggaatttacagtgacgactgtgtctcttgctgtatatagtttgtctctagaacatccttttatgctccacacattgagtctttgtttccagcccatggctctatttgggagactggaatcgttaagatggtctggtggatgttaggtacccttagggggaaatggggtaccagtcccttctgttccttctctttgcttcccagtcacaatgaggtaagcaacttctgccccacgctcccaccatatgtactgctttaccaggggaccccaagtagcagcttccattgatcatagatcaacgtctctgaatccatgattcaaataagcctctctccttaggattatcttgtatatttttcaacagtgttagcaagcttacaaccctagaggggactttcacgagataggcttataaaatgcatacagcccttggctcaagcttccaaagcacaacacccgctcctttcttcatccccagccccaacaccccattggaagtgccttcacttagtaactcagggcattttctggatgtggctttagtataatttgccattgttctgggtctgcctttcagtgttaaactggggctcttcttagcactcctacgctgcagtgagactataatgatatgacttaaatgcttcattctcatgtccagcctcatacttagtttctgtggctcccagtgttctgcttccttctagtttctcctccaaaaccttgtaaattccgcactggtatcagtaactgacagttcctttcagtcagaacagtttggcttctcagtggtctgatctccagagagcctctcactgcatcctgcatctcaccgcccctgggtcatttaaacacttttcacgcttgcatgtacagatgagccatatgtggaacatgatctggttttgtcagcagaggacaggatctgggaccctgattttctaaaaccccgtggtgatgccaacactgctggcctatgcaccaccacacaccaagtggtggtgtttaaggatgggcagattataaagctcttcttatccagccacaccctctccagcttttaaaagtttcctcttcctcctccttttcctcctctcagcaaggggatggaagagtttatctgcacctactcctgttttccagcttctagttggattgttgtctctaaatcgactttaaattggttgagggctgagacagagcactgttgttgtcttatacacagtttccaaatgttttgtcttgctttcttgaagcatcactgaaatcatcttgggcatagagcctattgtgctatgtggagggaacactggaaaactgtgaaaggcggaccgtgagcaggccacttcctgcactagagaaactaggcagaggctttagcaagtatgttctgagaggccttcctcttgctccacatctttgaccagtggagcccggctgcccagctctccaactcaaatacccagctcatcctgatgttagctcatgagtcaaaaggagccaagagcctggctgaagagtatcatgttttccatttgtacaaagggtttgaaaacagttattgcttataacatttgcattttaaatgcaaatttattttatttttacaccaagtgggtgcattagctctgtgaaaataaggcttctggatcacaacgaatgttttacagtaatagttgagaggtcagacaatgattatttttaaacatacatgttctcccccgtagaaagccctctgcttatgccatgtgtctttcaccacaaccacctctgaaaccactgctcacgcctttacttgtcacagctaaattcttcagatggtctacactgattcaaagacaactttgccccactccttcctagagggtctgaagtggaattcgatgttcagttttactgaaattgcatttcccaggatgcaagctgtcgccaagtcattggatctaatggcttcttggcttcattttgctttcgggtctaaaacatggacgctattagccccacggcgctccctacacttccagatggttgaggtcagcagattcaccacccggctggccacagcaagcccttcctgtttccttttaccctctcacaccagctgcacgtgttgcaggcaaagatggatgtccagggttactctttttccccgcccccatggggacctcatctatttgcagggcttagactgttagcccaggccaatgttacagcccacaatctgcagcgctgacctttctctgcgctctagccctgcgtttaattgcctttctcgaatctattgtcacctcctaactctctgcttcctaagtcctttatttctgtttgtagcaaatatccattttttaatcatgatggttaagaaaggatacatttagtttatttttcttcaagatagtaagaatcttattttcttcttcctgaggtggcaggaagttcagtctccttcctcataagtccaaaggtcacgcagttaccactcaggttattcagcattgctaaagctttaccaccaatgtctcttgaccccactcatagaatattttaactgttacgtttacattacaccagaaccaggattttaaatatgtgtgtgtgtgtgtgtgtgtgtgtgtgtgtgtgtgtgtgtgtgtgtgtgtttgagtgggtactggggccacactcagtcttctgaaagagcaggaaatgaaaagtagactcatctgttgaaccatctctccagcattgccctctgatttattttaattgaaaagtatttattttttagcttaatcccctaaccttccttttccttctcatcctgaaggcatctaccccaaaggctttacagggtcagagcaaaggggaagtcagttaggcaggcgccactgtgtcctggggcaatatgtgaaagaccaggagaaccacctgtgtgctgcttgggaggcagctgaaggggaagatgacaggggaagtcagagttcaagaggcttaaaggaggtgtccaggtgagagggagaactgagtgtcagacctgagtgccctaactgggttaggaggggcaaatgtagaaagacaggtgacatcacattggatcagatgggggtctcatggctttatatgtgttcacagacctgccagtttgcccagccccggagtcgttggagcagcattgtcccaacagcaaagaacaatgacaggtcacaaaacctggcttccagatactgtctggccttccactgagtgagggccattagcaaagctggagtagaagggaacttcatatacttagcaagggaagactacgtactttgtatgatcagggataagggaaagaaatccactcagcgtgtccatgcagtgttgcactgggggttccagccaatgcctcaggaaaaagagaatcatctagctttgctgtctctgtgaccaagtacctaccaggaagagcttaatatggcaggtggtagtggtttgctcctgctttcagatgtctctgtctaccatggttgaggagacttgactggggcagctcagaccatgacagcagcagaaaggggccaagagcaagatgtccttaagggtccttccttagtggcctgctgtctcctactaggtctcacctcctgaggtttttaccatgttgctagacagcaacaccagctagagacaggctttaacacacgaaagcctgttttatattcataacaaacagcagccagattgaaaaaatagacataatattcacaggcatgattttctgcaatgttattcctataaagttattagaagtgagtttgtgaacgtttcacaagcaattaaaaattgaaatctcccaaacaaagccactttgatactatcagaaatataacctagaaataaattgcacaggaacactgaaaactacaaaacactacagtatggtgggacacactgtaatcccagcactcagtaagttgaggcagatcaaacatttatagttagcctctgctacatagaaagttggagcccagccccactcagtaaaaatgaaagagggggcagggaaatatcaaccttaccaagatccatgctatcccaattaaaatacaatcaaagtaatagctggcttctattgtttgaagaaattgacaaggtaattctgaatatcacaggaaaatgtaaaaagaaaaacaaaaaatcctctagaattggtaaaaccatcttgatttttaaaaagtaggaggtttggacacttactcaacctggcctcaagtgggtagtgtattgtaggtaaagacaaaactgttggtttctagaaaagagtagaaaaatctagaaatagatccatgtggtgattgttgctcaacaaaagtttaaaagctgacaattctggaaatttgccagccacacagaggatcttcaacccagagggctgccatttgaaaagtcactcaaaaaaaaaaaaaaaaaaaagatcatagattcaagtatagacccaagaactagagaacttaacaggggggggaaaaaagaaagaaaagaaaagagaatttttttaaaccaccagttaggataaaatttcttaactacggtgctaaaaacacattttgcaaaataataaaccaacaaactggactcttcaatttaagactgagaaaaaaattccagcacttgggaggcagaagcagggggatctctgtgcgctcaggtcagtctagtctacagagtgagttccagggcagccaggcgtgtttcacacagaaaccttatctaaaaaaaaaaaaaaaaaaaaaaaaaaaaaaaaaaaaaaaaaaaaaaaggaagaaaagaaaagagaaaagaatgacaataagcaaatgaaaggagaagacacagattagaagagggaatgtttgcaagtcatgtcatatgtctgataaaggtcaatcatttcatatttgtgatgaagtttcaaatctgtacttaataatccatcaataggaagtaaataaactataggtatattaatcactatctcattgctgtgactaaacacccagcaacttcgggaaagcagtactgattttggctcacagtctcaggaggcacagtccatcatggcagggaaggcacaatgacagtcacatcactctcacagtcaggaagcagaaagagagaagccctagtgctgtttcctttcttcttttgtccactctgggaccccaaccctagggatattccctgctcttttaattcttcttggaaatacacttataaacacaactagtggtatatttccatgaatattctaaatcctatgtagttgataatgaagattaacaatcacagtggcatatctacatgatagactattatttagcattaaaaagggatgagctattgatacaacaacaaagatggtgtcagtatacttctgcaaagtggaaaaaaaacaatcaaaaacgagctcatactgccatattctatttaaatatttcataaaatgtaaactaatttataagaatttcaagcaaattgagtgtacaatgagaaaaaagatacagcagagtatgaggaaaatttggagagtgttctctatgtctattattttattggtgtgattatttcaaggttataaaactgatctaattatttacttaaacatatgcacttaaataatactttagtagagctattaaaatgattctataggggactgaggagatgattcaggcagcaaagggcctgctgtacagtcttgacctgagtctggatcctcacacccacataaagtcaatctgattgtaagcctggggcccttctagccatgggaaggtggagacaggaagatctctggggcttgctgggcagctgatgtaggcaaatcagcaaattccaagttcagagagagaccctgtctcaataaagaaggtgcagagcaattgaagaagacactcgatgtctggtctccaatgaacacatagtcactcatgcatgtacacatacatatatactcaaaaagatttcatgaaacttttgtatattcggacaaaggttgatatgacgtgcatctgtggatatgatactaatttttgatagaccttaactttttgctaatacgcctttggatttctttaaggaaacaaatcattacagatacagttgaaactttcattatcccatcctaatccaattttccctccacttccgcctgatggtaatcattgccttgatttttctggttatggatcttgtgctggctctactttcgttttttgtcatggtttgcatattggaaatctttatataaatggtaatttcctctcaaaacttgctttttatattcagcattgtgctttttgaaatctctccatgttgctgtgtgccactcatttatcggtctgcttcataaatatacacaatatggttaatctcctcttgggttttaagctgtttccaattttccattcttacaaacaaagatttgtctcactcgtgttggccttgaaaattcttgagaccattgcccctggcctatgcatgcgaatacttcttaggtctaccttagattatttctgggaatcttcagtttactagctgtgggccaagtggtttgcacacagcatttggtgcacccaagagctcctcattcttgctcacacttggtcctgtcatgcttctaagtgtagacatgggtgctttagctcctcctggcaaggcgtagtttctgattcctccaggcatagtgtggagccatcacttggaagctggctagcttcttagaggtcagcgaatgagttgaactgggctggaggtttcatgctgtctttgatggatactttttgatgttagcttaatttaattaaggagtacctgggggataagcaaagtacaccttggatgtgtcagtgattgtgtttccagagacacttagatcctgagggctctgacctaatgagtgcataaaccccttgaattcataacttgtcgttattgggagctggtgaaaggaggaagtggggtctagttagaggaagtagttctgagtgtataccctcagggctatatctggccctgatctcttgctgtatttcccctgtctctacttctggtctgttaggaagtgaagagcccctgacaaacatttcccatgccatttgttatgaccaagttcaggggacaaagaatcctggactgagacaaaataagcccacatatcctccctccctccttctttccctctctcccttccttccttccgtccatccatccttgcttctgtgtttctgccaggtgatttggtcacagcaattgaatgctacctagcacaggaccctgttcctactctcctggaaccacagacctctggtgaattgcaactttttttaaaaaaaaattttccattttttatttaaattagaaacaagattgttttacatgtcaatcccagttccctctctctccccttctccccttctcccctgcccccccaccccagataacaccctacctatcctatacactttctgctccccagggagggtgaggccttccacagggggggtcttcagagtctgtcatatcctttgggatagggcctaggccctcccccgtgtgtctaggctcagggagtacccctctatgtgaaactggctcccaaagtccattgctatgctagggataagtactgatttactacaaggggacccatagatttccaaggcctcctcactgacacccacattcttggggtctggatcagtcccatgctggtttcccagagacacatgagctgatggcttttcaggaaagataatacaaacaaaaagttgcagaggaacaggaaaggtaatgagaaaaactcagagaaaagttgagatcctccaaactattgtcaccatgaaaatggtacctcatcgttatggagatgttaacccccatgtcatctactctttcctgcagctcttcatatgtcaactcttaattcaacagcctcccctagtccctgcactttccctacactcaactgttatctcacagcgagtacctgggccaatcccttctctacttcactcccacaactaccgtagccctctcttccaatgagcactagggaaatattcttagaggaccatgttgaaccttttggtgtcctgttagggccctttaaagttaaaatacagtaaccaattgaatgtggggattttgaaaaatcttgccacaaaaaaatgtttcttaatatacaactgccaaaaaattgattcagattcaaatgttatagtgaatcaaaggtgtttctggtgtcattcacctctgttgcatcatgcaactccactgcaggctttgatagattacacaacatacatgttttgcactgtgcacagcatcatgacatactacaccaaccaaggctgtccaaaacacatctgctcagattcaagactgtgatatgttattgattgtaggggttttcctgtccatacaaggttttctgattgcatagaagtgtcacagtttagatactgaaaacaagtatttttaatgtttgtctaccaccatccctcagcttatagggatcaaattaatgtgcccttggattgtattgtgttagaatgtttgatttataaaatgtctgtttgggttttctgacactttagtctctacaacaattcttaaaataaattttgccttacaaaaacatgcatattccactttgtactgtgtatttattcaaagtgatgttatcagcattgatggctataaaatcaagatgtcaatcaactctaaaaacatgttgaagatgctttacaacctatagtaccaaacattcaaccacaatttctttttttcctcccccccccaatagttttattggagtgtaaaagaaaagacacagggcaggcaagctgggctgtaaatctccacagctgcctacagaaggaagatagtagagaaagagaaagggccatagagccagaatgaaggtcagacatcagacaaacagccatggaggagacagaggactgccaaattttaatgcattatgtataagtaagcatatccatcttattacactatagatttgtatccatctttaataagctgtaaaaatacctatttaccaaggaattgtttttaaatacatgtctttattatcggtaactgtttgtatacatattttatacacccagagttgtgtacaaatttctaaagtgaaaagggattgtgggtggatatggcttagattaaccactgccctgaaagtgtcagccttttacaatctggattgtatcttcttctggatgtatacagcctgttcccaggattaactttagctccttcttccctacctagcctctataactccagaccactgcttcaccctttcagaactttatgtatcatacccacgccaaccacttgggcagtgaccccagccatctttaagatagttttattttgctatttgacttttcacatatgtgtttatgtttggttctctgaagatggatttttctttgggccaccagctcacaaataacgacagaaacgtattactaattatgaaagctcacctttagctagctcctatagcttgaactaacccgtttgtattaatcttcgttctgccacaaggcattacctctcttctatcttgcacctcctatttcctctgaatctggctggcctttcctgtatgcctatatttccttctcctcttcttcctttctctccccagaaatcctgcctacacctcctgttgtggaatattagtttaagatgtgttacacttgtttaatgatgcaaagatgtgttgcattcttttatgttgcatttgtttaactctgtcaagctgtgttactttgcctgtctaaaacacctgattggtctcataaagagctgaacagccaataactaggcatgaaggagaaatagttgtggctgcctggcagagagaataaataggagaagagggaggagtgagaaaaagagaaggaaaggaggacgtcagggactagccatacagccacatagccagccatggagtaagaaggaaagaaagttatatagaataaagaaaggttaaaagcattgaggcaaaaatgtagaagaggagaaatgggctaatttaagttagaaaaactggctagaaacaagccaacctaaggttgggcattcataatattcatgagtaagaataagtctccctgtatttatttggtagctgggtggtgggccaacccccctccccagagtaaaaataaacaactatacattctgattagctattggccattcagctctttatcaaaccaatcataatgcagcttggcaaagacacatttcagtgtacaaatattctacaacatatctccctttctgtctaaataaaaagaaaggatttaacacagtacaatatgaacaataatcaggtaagaattatatttacaatgcccagtccatttgtatttggcaaatttgaagaaaatactctattatctgtcttgtcttggtgggtctaaacctttgtacctaattcacattctattttagcttgtattaccaacccaaaactatctttctagacttcagaacattttcttagataaacaacttaaacttttatgtttttcaaccttataaactttgtatctcttatgtaagttttttctgaatttaataataaggaaaacactgtagctatccatctccaacccccatcaaacacctaagaaggataaaatagtacctgattaaacaggaagtgcagaacaaacaacttccaacactacagaaatagctggctgcctggacagtcacccaagattcttctgtaatgttggggcatccattttcagcacacaggcctataatatctgacagatttttctgtgaagcaggaaattttttaaagactgtcttaccttgtcttggcaaagtttagcagtcactttctcacactgtcagcagtagaggcaacggcagtttcttgcccagtggataactttgccacattaaaagcaaactctatttggagcttcttcaatgcccatcatcttttttgaagtaaattggtgctgccaggagcagtttcactgtcataaaaaagccttagtattaaaacatcttaaatgtcattttctttaggcccctgaagtgtttgaagaccatctgtctatctaaaatatatctctgtttgactttgaaaatacacctaacatggccacaaatttgattaataacctgtgtttcttaattatcctaaccagtttgtaataataagtttctaggactagaaatttacattccattgttaaatgagctgcataggtacaataccttaaacaaaagtagaaacatatatatatatatatatatatatatatatatataataacaaaaataacgttaagtttgtattaatatacaaagataccttaagagaagaaacagagtattttctaacaaaaaaaccttaaatttatatcaatatacaaaaatccataccaatgtaaagtatttgagattacagttgctttttagtttaaagtagattcaataatctaccttttaattctatcattcctatacaccccttttttttcttttcagaaagagattcttgaatctagcctccctcaattagtttcctcctttatcatgaccagtaaacaatttgcaaccaacccctgaaatgatgataaatattcataaccctccaaacaaccaaaaatacccacttcttggatattgtggtgatatattgtttatgatttattaaagtttgccagaggactcagaaagcaaagtcagccacaagctatagaagccaggcacacacctttaatcccagcagccagaagctaggaggtggtggtacacacctttaattctaggacttgggattaagagatagatggatctctatgagcccaaggccacccagatctacacaagagtgaaacagtctaaaggagaattatagctcacacctttaattccaacattatggaagtatataagacagaagcaaggtctcagtagagacatgcattttccatccacacagaggaaaggttacagtctgatgcttggtgagaacttgtggagacacaatcagcccattcagcctgaggtagaggtaagaagctagtggccagatgctttgcttctatgatattcatcttgaagcttgaagcttgaaacccagtatcagtctctgggacatttatttatttgtggcacaggatatatggatattgtgttctctagtctgctttctgttgtctgagggtaacagcatccttaggagaccctcagaaaattgggataatgatcaagtcctgggagagctagctgtatcatttgttgtccagtctctgtgtgatgggaaagtgcagggcttatctgaagtccttgataaagtattctatgagactggaccatcccagctagcaactttgaaatctttctggatgtagaaatttgaggaaactgcaaccgaggcattctgagaggctggatcacctgggatacttgtctttattggtgtctggtcttttttttttttctgaaaacacaaattttcaaaggtaacatatatatatatatatatatatatatatatatatatatatctgtattaacacaagtatggaatgtgcagtgtgcacaaagtcagctaaagatgatgacactacaatggtaccaaacttagcatcctaggactctggttgtttggaatagttgcaagtacttgtggacctaaacttgtgcagtctttggaatacaataagacagataaccttatttttatgacttattcattattttggtactacactctgaaactcatggaattttctaagacctttatgcttctttgtctgagaggaataatctggcttatacacactgagaacagaaagacttgtggattttccacaccttgtgttattttagttagaagtagtactcaggacaaacccaggagtttcctaaactccctgaaaaccagtgtgagctgaaaagaaactgtctcagattttacacagatgaattaaacttccgtgctgatctttttattttttaatctgtggctttagatgttcttttgtcagaatgctggatacaaatgctatattgattgaatttgaatttcagttaacaaaaaaataagtatagtaagtttaatagccaaagttgtgatagaattactaggagtaaaaaaaataataaaaaataaaaaaataaaaaagaattactaggagtttgaagctgaagcttgagcttgggattaagaagtaaataattttataggttactaacaataaattgatcattttttaaattaataggattttactttaaatttcttttgataggtaaaatagtaaaataaatataaatactgttatattatacctgttagatctcatgttatatgatgtgggatctacatgctgcatagttaatgtgtggtcactatctatctctatataattcaaaatgtacaaaagattatatggcaaaaaataaatttcttctcatttattcccactagtcatccttcattagtagcaactttaaacattctaaagacacactacgcacatgtaagtacatgtggtggtttgaataggaatgtccccaccccagactcatgtatttgagtgcttggcccataggagtagcactattaggaggtgtggctctgttggaggaagtgtgtcactgtggaggtgggttctgaggtcttatatgttttagctgtgctcagtgtgacacagtctccttctgctgcctgtggatcaagatgtggaactctcagttccttctccagcatcatgtcagcctgcacactgccatgtcctgccatgacaacaatgcactatcctctgaaactgtaaagccagccccaattaaatgttttctttgataagagtttcggtggtcatggtgtctcttcacagcaataaaacactgagtaagacagtatatatttgtgcaatcctgtgttatatagtttaaacttatttttaaattgttttattaaaatatttttacattcaatgtgttttgatcatattctttcccaatacctgtcaaatcctatcctcccaccttcttacctatgaaacttcattctcctctgtctgtctgtctctctccaaatccaataacacacacacacacacacacacacacacacacacacacacacacacaatcacacaatctatggagtctgtttggttggtcaaccctgaagtgtagctgacataccagtgatactcctctggagaacactggttttccctttcccagcaggtatcagttgcaaattgttccttgctaggggtagagctttgtgtgtatttccccttctcaatgttgggattttgtttggtttgaatgtgtgcagctcttacatgtgctttcacagtcctgtgacttcatatgtgcatcagctttgttccatttagaagatgctgcttccttggaaccgtactctacctctgactcttatcaattttctgcctcctcttctgtgtagacgactcagccttgagagtaggtatttgacaaagacatcccatttcgggatgagtgctccaaagtttttcattatcttcacattatccagttatgaatctctctattaattaccatctagtgcaagaagaatcttctctgatgaaggctgaatgatgttctgatctatgggtaaaacagagtgctattaagggtcattttatttttatgttcctttagcaggataagagtaataacttttcctttagtttccctggtctatctagttcttggttcttgacccctttagcattgtcagggaagggttccatttcatggatggggctttaaatctaattaaaaaaaatgtggttggtaactcccatgacatgtgtgccactattacactaatgcggattgcaggcaagtcacagttgtaagtcacagagtttgtagatgggtgatattgatgattgctttattcttctggtagtgtgcagagtgtttttctgcaccatgaataactagttagtaggggcgaaacttctagttagataccaggtcaatttctttggtgacatatgtaagtgttatcttcagaaatagagactaactgtagtattatttggggggggggtaacaaatagccttggcaatagcatgtgctgtttggaggtgttcaaggacccctttggccaatgactcaacaatatgtaacccaattctggcactggaggttttgcttgcttgcataggatgtctagttgggacgttgtctctcttgttctatggtggatgtggctaagttggtaaagtgcttgactagcaggcagtttatactccctaacttctcctgcttggtctgtgttagatttatgttcatttccctttaatagcttcagtgtatttttctgattgggataccctaattgagtttccatagtgattacatttagtttatttcgaatcatttactatttattttaattgggtcttccaattttagcaatcatcggtctgtgatgatgctaatttcccaatactacacagcatattacccaattttcttttttaactattttctgatggtacagctgaaaaataacttggatttctcatgtataataggttaagcgttcttatgagtgaagtgatctagcacacttttacagcaccaattctatgctttctttgtcattgttccacttggtatcatattattgattcatggaaactctttacatgttgcctgtgatagatgctgacataactgagcataacttctagtactggttcctgaaagagacattaaatcatgatttctttccagcatgccattctgcaacctaaagtatttacattataaattttaaacaatgttagaaaatatctgtttccttccttctagagtagcttctgtaaagtatttcccacaaaaacaaggtcaaactcatcagttagcaatcttctgtcatctttccaaactcggtccatcggcatagtagacgtctttgtgtgtgaaccagatcttgtggtttgtgttctaatgcaaggaagaagcatacttgagatggcttgtaagatttagtcaaagaacagcctagtcattccttctggatcagaggccattcctttaggtcagaggctacctacgggctaaatgtggccacagtattttatttggtcagcatcatacttagaaaagcaaacaaatcaacaacaaaattagtgagtgattttacagaaacatctagatttctagcttctcttggagaacacacacacacacacacacacacacacacacacacacacacacactagcaaccggtattttcatgtgacagagatttataggaatctgtccttaataagccatgaagccagatattttcagtctccttggcccagcctgcttccctcactaagtaaccacctggctcctggagtttttgcctttgcaacctttaaccctctgcttccgtagggccccaccccatttccactcctccctggtaccagcctccttttctgctttgagactcaccgtggcatgtttgttggactctgtcccatgtcctcatatcccccatctcagcactttcttagcagtgcagtctgttctttgggatggcttcccaaactttttggaaagacaacagtctgctctactagggcatgcgttttaaagcagtaacaggctttaacaagcttgagagacaagaacagaagcatattgaaggtgtccttggggcaccgctgcaatgaacacatctgcttggatggagagtgtggtctcggggttgttctgtgtgctgcatccctctgcttcttctcgctcacatcctcctcagcagccaccagaaccatagcctcagccgtgtagtccatgtccataatgtagggttctctgcttcaatgacttttcagaatgcttttctaaagttcagctctggtttcatccaccgacaccccttgtaaagcctttcagtcaaaaaacaaaacaaacaacaaaaaaacccaaaacaaaaaaaccttcagtcaatctctgttgtttagaggaaatgctccactgtccacaaagttccctgggcatttatgaggccttcagactcatttctcactcatctttgtacccttggcctaggtgcctccgtctaccattctctatgctaagaacatttcttcccaagttgatgcaaattcaatgtactttaccaggaaggtctactcctcccatttcagctagcttgctcttcacactctgtgctgttaataatggttaatactgattgtcaccttgctagatctacacctacttagaaagcaagtccctaggcacgtctgtggggggttaacgagattgggttagcctctgaacacacctgtgaggggttaactagattggattagccttgtgcccacttgtgagttattaactagattgggttagcctgtgtgcacacttgggcggtattacctagattgggttagctactgagcatgcctgggagggactatctagattcggctaattgacataagaagagtaaccttaacagtgagccacttggtaccacagactttggtcctgggctgaataataaggagaaagggagctgaacgctagcatactcacctccagctgtggacataatgtgaccagcttcctcaagttcctgtcaacatgaacttccctgtcactacagactgcaccttcaaactgtgagcaggataaactctccctcccttaagtcaccttcattggtatattttatcacagcaacaggaaaaagcagctaacataaactcgaaggcccgtcctccatgaagtcttccattttctcctacttggtccctgccgccctcttacccttgataccacaactaatccagcttctctctcactggactgtgaactctttggagtgaagaaactcatttacctttacgtctccagacacaatctcactgcttgttgtttagcaaatatttagggaataaaaagcagagccattgacactgtaacccctgttattactcagtcaatcatttgatagattctagagagtttgtgtttgtgttgtgtgggcaggccactattaaccaaggttttccattgacctcactcattgttcctcaacatggtgcaggccaccctgtgtgactgtccatcccagtttcagttgtcacctttcaactctgtcttaattgctgttctgttgctgtgaagagaacacatgaccaaggcagcttataaaaagaaagcatttagttgggggttggcttacagtttcataggctgagtccctgatcatcgtggtagaaagcatggtgacaaacaggcaaatatcactctagagcagtagctgagagcttacattctgatccacatgcatgggagggggagagggaaaaagagagagagagtaggcctggcaatggctcttaaaacctcagaactcaccccagtgacacacctctccaacaaagccatgcctcttaatccttccccaaacagttttgccaactaaggaccaagcattcaaatttgtgagcctatgggggacattctcattcaaaccaccacacaatgtttgacgacggcaacagttcagcagcctacaaatctcagccctggcccttgcttctcattctggcttgaaaatattttccaaccgtctctaatggccaagtacttgcacagcttagagaggcttccccagcctctcctgtcatcccgtggatccaatgtccaccatgtactcaatgtgacttatcacattgcgacctttgtctcttctgcagtcccagcttcaaccccactctaagctcccctaggacaaaaactttctgtttcattttttgacaatggtaggagggtagatttttggtgtgaactagattttcaataaatgtcaaatgactaaaactaacagaataaaagatgcacaatttgctgtgtacaattcaccaaagtataggaatggttacccctttaatttcttacattcgatttgacccatccaatttcagttagtatgcattataaacatatgtggggatagtgagggacacagaaaccctatgttgtgctatttcaaacataggaaagttagtacagggggttgtttcatgatagtgagagactaggagaacaaggcaggaagcagaggccacatggctatttagtaagtgttggcatcacagcctcagataagactttctgtgactctgagggtgtggggcaaaatgggacagaagcattactggaatccagctgtttagaagaaagagaggggcattcaaccaggctcctgggattctaagatgtttcctaatgggcaaatgatgaagtataaaataaaaagtagagacaccatggagaatcaggggagttagcaaaacccagctttgcaaagggaacctatcatgtataactgcatgaaatttgaataaccactctgccctatataagtggatttcctagaatgtaaccagacatagtggaggcaggaggctaacacgttagtagaatgccactgtcctgggctgctgtctctccaggtttgtgatcctaacctgtctctagtctccagtgtcttctcagcctgcttctgaacttcatgatcatgggctcatgaagcagcttgtggatgctgtgaggcacttgaaaacattagtatttttaaagtttagattcttaagaactgtttatattaggtgtggaaacagcattttattgaacgcttgcagtgactccgagttgtgtgtatcaacctttttgggtcctcagtcaagtcaaagtatgtagtaagagctctgtggtgcctaacatctaacagacatcattttagacctattgacttacaaccaacccatgtaactttctaaataagtgtatgaagtagatatcagtctgaatttttttgaaattactgacattcaaccatttttacctacaaaatagtgatttactatatatcagcttaatacaatcatgttagaagcagttttaccaaagacatggaaactgaagcaataaggttaaataaggaacccaagtcacacagagctcaagcacagacagcctgtgcgtaactgtcactccctactgagcgctgctgagtggcaccatttcatcttctgcagcccaggagcctggggcttgcacagttaggtcccacagccaggagagtgtgctggacttctagacctgtccgacaactcttccttgcctctgcccttgttattccacatccgtggaataacttccgtgcaagcaatgctcccagtgggaagtgggtgaattagtccggcttgtttctcaggtgcagctgtcacagtgacttggttatttgcaaagttgctttgctggaaacactgtttcatgggctgttttgtcatcaatatcagggatgatacaaacaatgccattctcaactgcctgaggtgttgtctagacatttccctgcaaagtacgttcttgattcttctttgaaaactgcctcaaagtcatatttgttcacctgtgaaagataatcagcttgaaaccactcccctatcttccctttcctcctcagaaatctattgatgtattgaacacatactatataataagcccgctgctagttgatagtgacttgactgtaaaggataccgacgtatcttctttattgtattttcaacctatctaggcagtttgactccaagagaaaattaacaatcactgatctttagaaaaagattcattggttttatctgtaagagtattttatctgcatgtatgtctgaacattatgtgcatgcctggtggcctcaaaggacagaaggggcttctgagcccctgggactggaattacagatgatcgaaagctgccatgtgggtgctggaaccgaaactcgggaactctgcaatagcaccagcaccctgcccttaacctctgagtcctatctccagcccaatttttacatttatttatttatttggggttgggagatgcacatatagaagtcaaggacaattgggaggagttgttctttcctaccctgtaggttccagagtccaaactcagctcatcacacttggtggcaagcacatttactggctgagcctcctcaccagtccccaaataagtgttttgatagttgctcagggagttctaggtcccttgatccaggggaggataatttagtttgtagtacagctacgcaaggtgtggcatgctggatagttttataccaacttgacatgagctaaagtcatctgagaggagggaacatcatagctcataggtgacagcaatagtgctagtcaggaaaccacatgacttagtttgacttactattgctataatgaaaccccatgaccaaaagtaagttggggaggaaagggtttattcggcttacacttcaatattgctgttcatcaccaaaggaagtcaggacaggaactcaaacagggaaggaacctggaggcagtcgctgatgcagaggccatgggggggggggggttgcttactggcttgatcctcatggcttgctcaacctgctttttcatagaacctaggactactagcctaggggtggcaccaatcacaatgggtttgtctcttcctccatcaatcactaattaagccccctggaggccccaggcttgactaggcacttcctctttggaggccattgtgcaaccagctggtcagtatccctgaagggcttcatcaccacacagcaggagtcacctgaaatgatagagggacaagaaaacacaagctactgtggaaaacccgggtaccagacctggaggcttgtggctgtttcggctttagtcagtccctttgatggattccagaatatatcattgtgtccccagccactctgaagtgagcagatcctatgtccccatagggtcggcaagatacaatttaataaacgtcattgcatttgaatttcagaaaaacatcaaataatgcatgattactgcctagatattgggaaacatttcattgtcacagggtgtcctccatcttatatgtgctaggtcccactctccagaggcctctaagagacagatactggtgcttccagtcttttatgttgggattctctcacaggtggaaactttccatgtgtatcagaggaatagatgctcaaacttcgggtaggctctctcccggcaccatgtttgttcacgtatggccatctaggaaggaaactggaacaagaaagcatggaggttagctctccatccttccctgaaccttggctgtacagggctagcctgtgaactggaggtaggccaggcggcgtcatgtccacaggccgtcagacccttcagaagagcgcttgtggctcactgaccaccgctctcactgcaaactccttagtgggttagccgaggacggggtctcagagacacattgctgatctttcatgagcggcaggctctcagcctgagacctggacaaacctttcccctgactccagacccttaatcgctgcaaccctctgcctggggagttttgaaatttggttgaaacaagagtcgatggaatgcaaccggccaggaagtggagctccaaccaccacttcaggcaagactcttcccttaccagagcagccacacaggtgtctttacgggattgcacctgggcaccttcttgaaagaaacaaaagcagaaccaagaaaagtcaacctgaaggttgttaagagtagaggtccctggttctgagggtggatggagtcagaactgcctctctgcctattttctttctttgggagatctgggtgaaacagtaagactgcgctggcttgggccattgctgtcatctgcgatttaagatataactcactgacaggaagctggtgctgctgttatactgaggcctatggggcaaggctaccctcttgtggtagggtttgggactgttccctcaaaaaattccctgtcagtcaattcaagaaggtccaattacacaggattaggtaaaacgtcaacaacagcagcttaagcacacaagatttacttctccttctaaaagaaagggtgaaagtgggcagtcatagcgactaaggtgactccttggtccccaaagactcgggcttccatctaccattcaggtgaatttagtcctaatgaatggtttcttttcaaggtcacaggatagttgctggagtgacaaccataatatccatattgtagcttggatacaaaaaataaataaaaagggggagaaataacagaggtgagatgtgtgttgggatgaagtctcccagttgactgtcccttaatagtctttcagaaatcttcaaatacatgctctgctgggcccttctaaataaatcagttgctaccaccaaggaagtgaaagaataagtctccaatggcagtggtggcatttgcctctctgggaagcaagcaggcttgagactttgaaagtctcaaagccctttgacagttggcccaaatttcctggctgcaggtaagtactggagtctctcacctggagccaacccggaggtcaggagagctggaagattccagcaggcttgcctcagggtggctgctgccaggaattagagatacaatcccacacatctttcttacccggaggcttggctcatctcaagtgggtctgtgagcaggctatgtggaatgtgggggagtgggaaagggagtggctgtgtctccacagatcttggtcacagagcactgcctgaggccctagagccctagttggtgtttggttgaggcaggggagctggttgttggaaacttatggaggaatcttgagtaagaacccaaccacgagcaggccaggcctatttccctagacacatgagaagaccactctggcttgactggggtgccaggttgccctggccctgcagctcttagtgatacaatcagtactgtcctgggcacactggaagagtcagtctgcttaggaacatgcatgagataagcattttctagggacccttagctttgcctaagggtgcttggggctagacccctgtgagtgacagccagggctcagagccaccaggttctgtttatatagagatgggatatatagatcagaacaaacatgtaaatgggagaaaaaccaacaaatattccaaattctgtagcatcagccagagagcctagggtcagcctgcttccttctcttcaacctcatctacccctactagggctcctgcccccaaccccatacacatgtcagcatccctccagtctgtgtcagattgcttctggagtttctgcccagaataaatttccttcagtcatgtacctggtgaagtctggctgcccctccacctcagtggaactttctctagccctcccaggcatgctaaatactctctcccactggccatcagtggacctggcatgtcccaccatgctgcatcctgttgtcagtctgtggcacaggtcagattctcccactgtccaatcatctcccaagatttctaagtcctccccctgaggcgagagtcttggcttgtagttcatggcatgaatacttaattcattagaagggttgagcagtgtgtatatatgtttatttatgtttgtttattggatgttttccattctggacaacagaatattggccacaactctcagttgcttccatgtctactgatttattttttgaatggtttagttaacttgaggttttataaagtcgaaaggggactttataagaaaatattgtcatggagaataaataaaacttatacacacaataaaacgattcattaccgataatattgaaaataaaaatccatgtcttcctaccagttacactaagcagatatagatgaaaaataagtcttattttggaattataggcccttttgttgcctcacactgaaactagaaaactccctaaatgaatatagatacatttagaaaggaccaggatggggtaagttagacttcattacaaaaccacagcaagataaaagcaaaaatatatgccaaacctcagagagttagtgaaagtgaatatcctcccccaccccacccccaccctcatcccccaccccccaggtcgagtccgctgtggtgggtcagttgactcagagcttcaccagagccaaagagagagagccctgggctaacctgtggccctgcagacatcccaaagccatcaagtggccccagaccgccccctgggaaagaaaatagggacaattctggccagatgagattcctgtcccatggggaaggcttctgttggggagatttgtaggcagctaactgtgggagatgtgggacaggaagggaggagggatgtctgtctctcttgaggtccttggctgggtgagaaagaaaaagaagcatcaggctggtgggaggtgtgtaacttagcagcagtcttctcaggagcctgagggcttttgtgggttctggcatcagactgtcccagttgctcaccctggattgggctgtttggaaaaggagtatgaccatcaggtgattctgaaaaggacccactcctgagggagccacagctggggaatgagtgccccttgaacctgggattcaccccttcaccagggaacacaatggccactttccagcagtcaccagtgcagagatctgaacagggttgctgagactctcttcctgatggatgacagcaggtgctcagctgtctctatcagctattatacagaatcagtccgctcacccaactaaaggatgggctctgcttccagcgttgatttttgtcaaacttgctatgaattaataccctctccttgggctgcctctggctagagcagaccaggaccctacacagatacggagccactttctggctgggctgtccattctgcattaagggctctctgccctctggtatcagaatcatactctttttttttcctgtttgatggcatgggccacaccggaaaccacacaactctgctgaggaacacctgtgagatcagctttcattgaactcaagttctagaggacaccacgtccagaaactcacttcactgtttctgactctgtggtgacaatagcagtggctggtcctcagagcagttttacaactgccctgtgcagaataatttacttttcctggtttatcataagcaatccattggacagatagtttagaacattccccaaggtaaaatctggtataaatggtgggaatggtattctaacttacaccagtcttgactttggaatttaggttcttgtttgttgtcttttgtttgtttggttttttgttttgttttgatttgagacaggctttctctttgtagctttagagcctgttctggaactcaatttgtagaccaggctggcctataaatcacagaaatttgcctatctctgcctcctgagtactgggattaaaggtgtgtgctcctacctaccgcctgcttcttaaacagcaagccacacagcttgtcaacccgaagagttctttaaagcttagcaatgagtggacacctgagggcagcaaggcaaatttccatgaaatacttcacaagggtcacatcaggcactaaaggtcaatgcttgcataggaaactcgaccagaaccaaagtcttagtaaagagcccttgtcatgtggaagaataaaggaaccaatagtgaataactttaggaaagagatgcaattaaagacatattaaaaatatacacgtaagagaagctgtaatttttaacatgggacaaatggtgaccagctttgggaagtttgtataaaagttccattaaacagttaggtgataaaatacatttcagtttggaagacagccagccagcatgattggcagatggggtggagtagggtgagatgacagcagctacttcctagggacattgaacatccccatgcttccctttgggcacaataaccgcagcctccctgaccgtgcctacctctctctgaaatggcagcttggttgtttacaaagtctcccagttgtgaggcagtaccctctattttaaatgatctggtaaagactccaggacagtttataaatacaagctatgtgtgaacaagttgttccttcatcttcaggtgtgataatttgatgggctttcttcacgtcatgttagctgggaacctggcctggaagaagcttgatgccgtggttctttgatgtgaatctaacctctcatgtcagctcctgtgttaggaaacaaatagccacaaggagtgcgctggccaatccctgcccgccctgcctgctgatgaaatgtgctcacagcaggcagaggctggaggtgatttgggtctgacagctcagcctccaaaccacattttccatgcgtcaggaagatgaacaccaggtctactccacatgctcattgcaattagacctttattaatatctcagagcagctgggaccagaaagagtctcaagtgctcacattctttgaacatacaaattttgagtgggcagcagctgctgaggccaggtttattcatcttgagccaaaattctcatgctttgaccccatgtcctgggcctagacttcatggctctgtgaaaatgttgctgcaagtttccctctggggaatcaaacccttcctgttagacaaagtgtcttttctcccagccctcttttcagccacactggcactggctcaagatttatgaaggaacttgatttctaaatttagcgatttgtttgttgccactgaacatggcattaacttgtgtcttttgtgtctgtgttcccctgtgtctctactcagatggacttcacagaacagtatgatgacttggcctactccacctgcctacctattaaagaatgtttctctggcttctgcctcagtttcctggagcttgggatgggcttatagactgggtagttccaaataggccaactctggggacgtggatgttgttccttgccttcagttggagccaatctcttcacaaggccataacagttctctcccccgacccccaccctttatgttcaccaatgaatgaatcatttctttctggataggattctaagcatctctgttgtataccctgcttatcctccacaactctcttctcataatgctttctagacagaggagatggaggctgtggaattaattccttttctccctgtctgaggatgaagcctgacttagccttcaagaatgagacccaatactctgtgaaaactaggtctttatttcccccatgtctataaactggcgtcatagtaagcactctggtgggttaaattctgctttatctccccataaaggtgtgcttaagtctcgatactgcagactatatcttcgtttagagataaagtcttatgtataatcatattaaaattcagtccttagggtgaaccttaattcgatgtgttcatcattctcatcaaatggaggcgtttgcctagagacagaggcaagtatatggaaattaaactgtatgggctcccagggagaagatagccacctgagaaaggccttcctcttagccttcagaaaggacccctgacaccttaattttggacctctagcttccagaactgtaagacaatacatttctgcttgagccactctgtctgtggtgctttgttatatcagctctaggaaactaacacagctttcggttaagcctttcactttgtcttctgcatttgaaagttatcttttgtttgtttctgtggtggctctggcagtacatgctgtaatctcagcactgggaagcctgcactattgtgtgatcctgcctcaaaaacaaacaaacaaataaataattatagataaataatggacaatacaacagaataaaacacaagttgtacaaacagaaaactataaagaactggattagaagggtggtttacaatccttcactgagaaaactctctttggggtctgaactatatctgtaatatataatatatacatattcctctaatatatatatatacatatatatatatatatgtatgtatattatgcttagatggctggacagatagacagacagatatggttaacacttagtgcctatttgactattaactgcaggaccacccttgcaaacacccaaacttacagatgtcaggtctcacataagatgtcacagtaactgcctacaatgttccctaaggcttgggcatttaaactcttggacctcagttgatggtgctctttcaggaagcttaggaggtgtggccttgctggaggaaatataccgagagtggacgttgagagtgtgtagcttagccctacttccaggttgctctgtctgcttggtgcttgtggttaagggtatgagctctcagcttcctgccccggcctgccatgcttccccacggtggactcttatgcctctggaaccatgcacccagataaacactttcttccataagttgtttttggtgttggtacttcatcacagtaatagaaaagtaatatgtttcatctaatccatgcacattctctaacagactttaacattgtgattcattttaatattagtacagtgtaagtactaggtagagagttgttttactgtatggtctagggaataaaagcaagaaaaaagttagaacatgtttcacaaggtaccttttccctgaatattttcaacccaggtctagttgatttgaaacctatatgtagagaggattgattatacatataaattcctataaaatagtatgtattcatgttgtatgtgtttaaacaattcaaacactccccaaaagtacaatagaaagagcaaacatgagctttcacttcctggtccttgccattactgttaagtcactgttttgagagctaatgttctacaccccaaattgttcatatcagactctctttctccctccatcttcaagagacttgtgcaaaggggctgtttttacacgctcatttggacattgctgttttctttaaataacacattgattcatccagagcagcacgaagtgtcctggtttcttcgtggctgtgcagtattccaccacatggatatgcagtgaatcacgtaacatgatctgtccaagagcccaagcacctggtcgacatcctgggctcctctgccagctgctcttccttttcaaatgaaggaaacagaaacacagaaagtggaagaattttgccactagaagcacagagaactaaggcaagtggttccagctgttagggttgtcaaacatttttcatactgttacaatttatttgtcaccaaaacaatgtaaaggtgttcgtgatgaaaggtgggggagggaccgtcatatcggcatattaacacacacacacacacacacacacacacacacacacacacacacacacacatatgtacactcacacatgcacaatagcatcatctgtctgcaactcttctaaatgaagagtataatgagttgaatgtagtctttcagataatataaaattgcaacaagtccctaatagcttgtgtaaacaattggttgacatctggaggaaatgagaaactttattaagtaaagtttaaacaaaagcttttgtgggtgttgtagtaggttttctattgctgtcatcatgaaacaccacgaccagatgtaacttggggaggaaagggtttatttggttacttatcctaaatcatgatccattggaggaagccaaggcaaaactcaaactgggaagaacctggaggcaggagccgatacaaaggtcatgttggggtgctgcttactggcttgctccccatggcttgctcagtctgctgctttcttatagaaccaggaccaccagcccagagatggcaccacctacaatgggctgggccctcccagattggtaactaattaaaatattctacaggcctgcctacagcctgatcttatgggattttctgaattgaggtttcttcctcaaatgacttttgcttgtgtcgagttggcataaaactatccagcattgtgattcttgcttatgtgtggattggaaggtgggcatcacatcttcttcagtgcagctgcttgtgtcatttgcagccacgtgtttttgtgtggtaatttttttattattattagcagtgatagctattgaatctaagtgttgcaatgagccaaacggctagctgctcttactacttcctgctacagtgccattgaatcaaatattttcaagccaatgtagcatttaaggactttgctccttaaaatgctattagttaaactattaatttgccaaaagctaatatgctttttgctttattttttattttttatttttttttcgagacagggtttcactatgtggctctggctgttctggaactcagtatacagaccaagctgccctcaaactcacagagatctgcctgcctctgcttcccacatgatggaataaaaggtgtacaccactatgcctggcgatatgcttttttaattttattgacaaaattgagttttaggctgtttttatatatgtaatcctttatgttcttttttacatatgttgtgttatgtacatagtgtgtaatagatgtatgtgtgtggatgaaatgtgtacttattctagaagtatgtactcaaagtagttttgcttataaaaatatgaaagaaacaaagtttgcaaaactataaatgtaattgccaaccaattcagccatagctgcaaagtattgctctgagttctaagtccttggaggaaaagaactgacagtttaggactctactctcagctaagctaaaatgtaagacagaaggcaaactgaggcatcttcaggcaagcaaatatccaatgcattaccattcacagttccatgctgcttttaaaagcgtgtctgctataggcactagacctttaaggtaagtgaggcacagtgggtggaagtcagtggggaatgcttgcctggcacgtttgctgtcctgagtttgatccccaacaccaaagaggcatggggaggaaggaggaggaggaggaggaagggaaaaaagaggaggaggagggaagatcagaacatatttgaggaaatagaagcaagcccagaagcaagcccaggtggatcataattaattttgagctgataaaaaaaggtgtaactaaaatactggatagcaaaaccatgtaacaaaaggagtgaccagaaccggcatttccccaaaggggcctaagcccagtgtgaggcttcctgggatcaaaatgccagtgaagacggcagtaagagatcagcaggtcttagaaagcatccaaatgcaaacaagaatagtaggaaataaacctcattctccagtttcagcaaacctaagaggtggctaaaagtttgtattgcaaaataaatgacaatgttccttggagcagtggacagtgaggtacatgggtataaatggggtagactgtgtattggagtccctgattcctcccaacaggaaaaaggaaaaattcagaagagaagagatcacataggcaggctagaaaccatgctccaggatgaccaaaaatttctgaagcaatagatattggagtggtcttgctatgtagaccaagctggtcttgaactcagagtgatcttcctgcttcagcctcctgagttctgaaatcctaggtgtgcacctgggtttaaacatttaataatataatctcccatccaacctgataatgtaaacccagttaaaagcccatgattgaatgatcataggtgctaaaggggagcctactgttgttttgctacatggccatgctgtcaaactgcattctgacggcttaagtttggactcatagactatgctgctttcaatttccgtcagacaaacttcccttttcaatgtctggtgatcaatgcagactcacaactggtcaaaaggctgagtataaataacaccgagttctcagctgtggacaggtcatctatccgagcctcccaccatgcaagaatcaggggattcaaaagaaggagcagtaagaatgtaagaactgacacatcgggagaagaactgtgaaatgctggtctctggacatgacatagctgttgcatgggtcaaattacagcagctatagttgcctgcacaaggcaggcacgaggtcaaaccagtcaaaacttcagcatggatggagagggcgcccatgccccacctctatctattagagttggtggctgttccaggagggaaggccactttcctttgggagtgtaactgctcacaaattgctcatgccccatactcatgtgtatatatgggcagcactaattggacgcgggttattactaacaattttaaaaaaggatgttaagttgcaggggagatgaggtaagaggcactgggaggagttggaagagggtagtggtgatggatataatcaataagtagtgtataagtgaataaagctttcaaataatacaaatattgtttaaataattatgtactctcaaaaccatgaatgagaatttttttagatcacaaccacaatgaaataacatgatgctcagcagcaaatggctcacataaataacaattctcagtaaacatatgaacgatttaaaaacacagttaagagcttgaacacggcatttcctgtacctaacaaagaatccatattattgcatttgaccatgaagccatgaagtgagtaattaaaaataacaaatgaatcaatatatagaccatgttgctttccaaaatgctactaaattagaaatgcattacgaaatgcaaatatagttatatatatgcatatatatgtatgtatatgtatatggagagaaagagagaacaagaaccatgtttgggagttttaaaatacttggaaataaataaagagtcagaataggaatcataattgaaattcagaaatgcctacacctaaataatgagggaaaacagcagatcaggctgtgggatgcccctgtggagatggctcgacagtaaaacacctgtcactgagtgtgggaaggagagttcagatctttagaagccatgtacatccagttgccgtgcagcccaccagtgatcccagtgcttggcagatggtgacaggatccctggaacaagctggtagtcctgacttgctaaaacatgagcctccaggttcaatgggagactctgcctcaatgtataaaatggagtgataaagatttccaacatagacatagtctacatacacaggtgcacacacacacacacacacacacacacacacacacacacacacaaacacacattgcttcatactcatgtactctcacatgtgcaaaccacaaatatagttcacatatgtgtgcaaaaaacattctgagatatggcaaaaacagagtttcaaagcaaatgacagattatacacacacacacacacacacacacacacacacacacacacacatatatatatatatatatatatatatatctgactacagtgcaatttacactggctgatccgaaaatactaggagtgtcaggatgaatgaaagcaaaagcaagtttaaggttaaaaggggaggggtcacttcaattgggatttttactgtgggaaagtctgtactgttcttattaactaactttctttaagagagagagagagagagggagagtaatggaggagcagagatattgaattgggggaagaatagaggagagagagcaggatgagagatactatatcagagggagccactataggtccgagaagagatctggaactagggagatctccagagacctacaaggatgacacgatctgacagtccgggcagtggaggagaggacggcctagaagcccttcccctagaatgagattgatgactactctctatgctatcctagagtcctcatccagtggctgatggaagcagagacagacatccacagaaatacactgagctgaaatctggaacctagttgaagagagggaggaatgaagaacgaaggggtctgtaccaggttggagaaacccacagaaacagttggcctgaaaaagggaaagcatatcgaccccagacactctttgggaggccagtacgggactgatccagccccctgatcgtggatgccaatggggaggcccctgcactcctgggagcctccagaggtggactggcgttttgccctggtgtgtgtgtgtgggactttgagagcccatctcgcttgaagggatgcgctctgtctctggacacatggggaggggcctagtcccagcacaggacgatttggtggacttggtggagccccttttgggggccctaccatgcctggggagtggtgggtggatggggtggggggtaggttggaggtgggggagaaggaatgggggtgggggagggggagggagagggaacttacatgtgaaacaagcctgttccctaacttgaattaataataataataaaaagagaaaaaaaaagagagttagagagagattattctagatgtcttattctagatgtctgtttcaccatatagacaaaagtaaattccagatggacaaaggttgaactgtgaagtgatggggaatgtactgtgtatgttcatcttattgattgttgaataaagtacttgtttggccaatgaggcagcaagttagatgggactaggagtcaaagaggattctgggaaatgtagtagagaagtggtgatccaggcaggaagtgacatagcaaggagactcatatttaagcaaggagaaacaggaatggtcctttttgacccctctgctcttcctccagtggtgggatgtgagccaccagcaagagagggtgccagcgaaaggcatcctctataagtcttataaaatatatagatttatgttaattaagactgagctaacagatgagaatcctagtcattggccaagcagcatttgaaactaatacaagtttctgtgtattaatttggggcctagatcgggcgggcggctggaagagaccggccacgtggcagtggggctcggcggcttttggtggaaagatttatcgtaacagtgaagagcagaaatttcaaattttcagaaagtgagtgggagaacatattggatgcagttaggaatggatgattaaataaaagacaaatgctctctaaccttgggtagatacaagaatttgattatgaaaattaaagtgctatctgttatgtataacaaacgacagtgaaaggaaagatgcagattgggaaaggatatttacaactaaaataagttaattttcatgtaaatatagtaacaaatgtatgagaagagagcaagggggtagaaccctctttcacatacgcacacacaccacccccacaccagaactgactagcaaactaacaaaaattccctggtagtgaggcatgaaggagagatgccacttgcatctggaaaatcagaactcaaaaaggcctggtaaggcctcagaaaaatagaaacttattctagtaagaatgacatgggcacagctattggctgtaccaaagcaggcaaggcacacgtgcttaccaactcacaaattccacccacatgaatttatgccaaggactacaaaaagtgcattcataagcaactgcaaaacaaacaaggaaccgtcgtccctcaaaaggcagactagaaaatggtggcaccatagactaaaattaaaaggagtgtagtatagctgccttgtattcatgcaacataagcaaatctctatgattcatggttgggaaagaaaagcaaagtgcaagactctctctctctgtctctctgtctgtctgtctgtctgtctgtctgtctctctctctctctctctctctctctctctctgtgtgtgtgctatttatgctaatttaaatacatacaaaacaactgaaaatgttgggatttataaatacttagtgaaagtacaagatcatgggagggattatcagacaattcaaaccgaagtaccctatggaaggaagtagggaaggcaaggaagaggccttagctttagctgttaatatgtgggggaaatgttagtaatttaatctggttgaatgtttgttttattttctgtacctttgtacaggtttgaaatatttcttttctgcattatttatttagatcatgtgtgtatgctcaggtaagttagatgacaacttgcaggaggagtgctccttattatgattttgggttgctatgcaatccctgccactgagaagaacagctgtaggcttggtttttgtttgtgctaaatataaatgcaaaaggaaagacccaagggaagggcttcccccagggtcacatccttggctgtcatgtctgcagatggcagtcacaggttccctttgagtgccaacttgttctcggtgttggtgcctgcccttgcctgcatcgtacagccagggaggtggtgatgacagagcctttcaaggactacaggtagtaggctcctttcacagaggtcatgttctcttgggtgaccctggagcattgctgtattgagacagatggatgaaaaggggagctggtagtctagccagaatatgggagagcgacatatacatgaatctctatcatcttgaaatatatacattgggttgtaaatggtccccatcagcctgtgtgttgcattcttagtccctagctcattactgggatgtagcagaaactctaagcagtcagaccagttgaaggtgtttggccattaggagtactccctcaaaaagatgagtttgggatccctgtctcttccctttcctctgttttgcttctccaccacgaagtgaatggttttatctgctgcctccatcatggcatactgcctggccacaggcccagagcaatagggccaattgaccatggaccaagaccttcaaagcagagccaaaataaacctttggttccccattaggttgatttatttcagacatttgttgtagtgccagaaagctgactaacacaggtctgcaaaagaaaaacatgctgaaagaactgggcagggggaaatgaagtttggggggcacttcttgggatcaacagaatgtgagattcctctagtttctagtcagtgagtgaaattcagccacagagatttccccatcagaagggtcaggggaggtcaagttgcagttgctttatagaagtgacactgcaatctgccagcaggcctgggtatccctctcctgcctccatccccacccaccactgtgcgctgagaatgttatttggtcacacaaagtagaccctccaaggtgagggcagacactggatgtggatgctgcagggggcgagagggagcaaatacaagaagagattttagaaatgcaggtagatcatgcctattactgatgttctcgcatttcccaataaaattaccaatcaaaacacagatagccccactgaggccaggcttccaggacagcaagcagatgacaaaaaagaaaattcaaagattacttcactttccagagaagaggatacacaggtttttgatcagcaaatatgacctgaatgtccttcagaatttgccatctgattttatagaatgttagataatagcctgtcattatttacaggttctaagctctaggacctatggatattatcttatatagtaaacagaatatgcatgttgtgatggctattcttggttgtcaactgaccatatctaaaattacctggaatccagaagcagagggcatacctgtgagggattttggcttggtttgaagtgaggggaagcacttctagtctggacctctgaggtaggaagacacatacctttgatccagatattgaggtgggaaggcacacctttaatctgggccacacctttggctagaagcctatataaggacatggaagaaggagcttttgctctttgcatgcctgtccttgccttgctgggattccagagtacattgaagactagctaagacccatggcatggactgaacaaccattggttcacagccagctgttgttggattagctggattgcagcctgcaagttatttcaataaatcctatctatctatctatctatctatctatctatctatctatcatctctctctctctatgtgtgtgtgtgtataaacatatatatatcattgtcttctgactgcaacatgcacacgtgtcacacatgtagcccactcttctttaagggactacatataatttaaaattttaagaaagagatgatagaattagaggatgggagtactcagattttttcgctcatcctggattacttaagtgggacccggtgcagtcactaaagggacacagatgatttagaagggttgatacaggacaaggaagcaatgtggctgtggtggcagaatgctatgtgactgactttgaagagtggggaaggggctgagtgtccattaatttagctctaaaagttagaaaaggtatggacgtgattctgtctggagttctgaaaggagccagccctgctgacaccttgattgtagtgaagatgactatagccttctgccctcctgtagtgtagacaatattgtgttgttttaggagatcagaggccctagggaaccaacacagatttttctcactgtcttcattaaaaaaaaaattcttccatgtatttgatatgaagttgttggtagaagattctccatcaagatcaggatgaagagtctagtcccaaagagggcaaaagagagactgggtcagcgtacattgtccttgtggtgggtctagttccctgagtaaaaattctggatcaagagctgcatatttacatgggagggacagggacttgggaataatatctaccagggagtcaggaaatcaggctgggcataggttggagccctccctcaatagggggcacaaagacctgggatttgtgaagctgggaagccctttgcagatagcccaggtagagcaatcaggttaaccctgagttatcagatgcagcagatgcaggctgttcccagagaaggggctgcagtctccatcaaggtcaacccctgggagaactcacaacatttactagactgtggcacatcttccaagacatgtctcttgattaagttcttggaacagaaacataagggaaattttcttattgaccctgctttcaggccaccctagagcttgcaagtctcaagcttgtgtgttccttttagaatacactgctgacagccactcagggacaccttggacaaagctgctgacataactgtaagtggtttggtcttggaccaaggtttgcaaacaaacctcccaattgatgatttggaaaggcttcctctgagagagcccctgactagattccatagccccttgctacatgagttggggttgttttggcatggtgctctgggattctcgctgtaccctgactgataaactaagctgtgtggaaagcacaggcaacacagagccaaggcctgtcccaggcatcacaccacactgagcctcagccaactctggctccacactctgatgctgaagcccagggcaaagcagggttgaagctgacttccagagagcctatttcttgtcagaacagccctaagcaaggtgaagacctttgattccagcctttgttgctctaagtcttgctaagaggccttctgtgctcatgtggttacaatcaacagaacgtaacatattgatgctttaatgacttggtgtctcccaaggacccaggggcattacatcctaagctgggtctggtatctgagggtctggggtcttgtgtggcttctgtcaactactacaagtgtaactttgagaaaggcattgaacctgtttccctcccctgtagcatggagctgcagtaaattatttcagatttgtctcatcttcaagtttcgggaatctgatgttcccccataagcctgagggtacagaatataacaggcatttgcattagaaactggcatattctagcatctgccttggttgggagaaagcctctgccattggatctctttcaaatgactgcatatatgacaagaccgtacttattttcattgattgctttacccccaagattagcatttaatggtcccccttgtgtcacaaaccccagtcctgccatcagtaactgaagtttcttgggagtgtgtgcatgaatgcttactacatttcttttaaaacccatgggattatttcttaagtgtagcagaatgctagagtagaaagtctgctaacatttatcagagtatttgtgttgtaatttgtgtcaattgcttagcccatgacactggcaagccattttatcccaacgtgtttctgatagggagaccagtgagatcatccctccctacctcatgtggtaaccttgaatttcaagtgcaatgggacttgtgaaggttatcagaatgaaaactgctattattattaaccacaatagtttggcaccttcagagcaacatgaaaaaacatgttcccatcagttgtacttgtttgggggaagaaagatctttcctgtttgaaacagaagtttttagtcagaatataaacatagggagtaagaagtttgtcatgccatcttctgatgttcccaagagaatgtttccaagcagaaaagtggctaaaacagtttgcaaggtcaccagctcttagcaactatgcctggtccagaaggacctaaccccagaggactaatgcttttacaagcataaggagcagttgttcttgtaacctatggtaccttgtacctgctgctgcattgagatacacagctctgttagctcctctagagcacagttcattagtcatgtggctccagttacaaggttgactgcaaatgtgaataacatcgcaattaaaaaaatcatgtacttttgtttttgttaattctactctgcaatcttagtccttctggggtacagggctcttactgaagcaagccctcagcacagctccacaccattctcttgtcctaattttttttttcagaaaagcctacccttggaagacagaaaactcacaaaaatattgtctccagaagtgcatcatgtttctccctgaatttacttctttttattggtacatctttgtagtttgagacagggtcttctgtgcctaagtctagctttggactctatacagacaaggctaaccttgaacatcagatcctcctgtgtttgcctcatgattgctactattacaggcatttgcaattatgcctggcttgtgtgacactggttaccactatgcctgggttatgccatgctaaagaccgaagccaaggtttcacacatgctagctggcactctgctgattgaactacacccccagctgtctttgcttaaaaataaaaccttaaattcaacttctcttgcaaaagacaattgaggtgacgtcctaggacggcaatgcgtgggcagtggacttcctgttctcctcgctgcagcttgaatgttcctagacagagcggagtgaaggaaatgcaaaccatcaagattagaagggctcatgaaagctccgatttatttattgtttacctgagtctccatttccctctcttcgctgttgggaaataactgctggtcaacactgttgcctggatgggaacaagtgcctcaggtcttgaagggcggggctgggctgggctcagtgagcgtggattggcagatggtcttacacaccacaatggtgggcacagatagggtctgttgttatagaaaccaaggccctctgagagcacacgggtaagggcaacagatctttgggaatagtgcagatggaaagctctggaacaaagccttaaaattcatcacagggtgacaggcagccccatgaacagtgtggctgagcgtgacagggaaccacagaagaggtgcctgctctcttctttgaaagcatgaagccctgtctttccttcctccaagcagatgttagctggcggttttcactgctctatgggcaggacagctttgcaagtgtttgtgactgcagagccagcagagtcccatcttctgggagctgccctgcagccctgatacagctactgtagatcctgtttctgagtcttatatggccgagcctcatagggtgtcattaaaatatggatccactccagttgccttatgtgtttggaaatatcctcatataagtattatgtgtcctcagaaccaggcagcccttctcttatagatattcacatttctaagatcagaggaggttcttacttcagaaatacagagaaaatattttcaaaatgttatgacttgcaggaaaacagacatttacgttggataaaatggagctccatttctttttgtaatagccacctcccttgattaagggtatttgtttttcaccctccctgagatttatcacagtgtgtggtttaaacaataccttaccagggaccctatggatgacacttgctcacacactagtttttccgtggtataagtgaaatgtgtaaagcacccagcaggggtggctcacttaagatgacatcccctctctatgctactggaatagggacaggtgccttgaccttgattgtcaatattttccccatccccatgcctcatagtagaagtatcaagtagggttctttaacccatgacttgaaaaagatagcaagaagggctacagttgactacaagtataaaatgagaattctgtgcagtttattatggttaactctgatatattgctttgtcccataaactataaataatgtacagtggagtccttggatcagtttctacatccttcatgttgaagacttgtctataggcaaatgtctacatcttgtcatgttcaagtctccctcccgttctctgctgactttcacatatctgctgttctctattgggtcttttaccatttagttctgaggcagttgaagctgtgggacagaggaactgctttctatgtgttcacaaaccctactgagcttctggagcacagtcagtgggagccattcattgactgaggccaggccagtgagcagatgtggtcagagtcaagtcaatgaccagaaagagcagaggcttccttgccctcctcccatacaaatatatgaactgtcttggtcaagatgtaactccttattaatgtagaggacattggggtatatactgacacaacacttaaaatggacatcctattagattgagaatgggaacagcaatttctgagaattctttgttttttttttcactgatgctctataacccagaggtatcctgattcaatgcagtgcttgcttaccatctgaggttgccagtctatcttctctgtttacaagcctgaacttcctctctattttatgccctccaagtcacattgaatatgggaatttaaatacattctagcattttggtgcatacagtgttaaaagatcttctgtacaaattcacttccaattccttcttgagtggtagcatcaaatgtttgttcatagactgagacctctcctgggcccagtcaggccagtcagaaacagatggaggaaaaggacaacagaggtctaggaagactttaagatggttcaggtgacctggattttactccaggctcttccatgaacttgctagtgagtttgggcaaggtgcaacttctgttaacctctgtccctcttctttcttgcctaatatatatatatatatatatatatatatatattattccttcttacttctatcaaataggtttctgagttgcaacaggaatgaatagtgtaggtaaacatagaacatcatagtagagaaagcataagcaattatttcaagaaagcttgcttataatcaggtagctttgtggtatgaactgactacacctctactagacagagttgtttttgaaaacaatggacattatgggagttggctggagacatggcttagtgagcaagagtagttgctgtgtaagcatgaggacttaaattcaaatccccaacacccatgaaatgtaaaggaaagaaaaaacaagtcaggtgtggccatatgtgtctttaactccagatgtaggagttggagacagatggatcccaaatgttcactagttagcaagcctgacagcaatggcaagtttcaggttcagtcatagatcttgtttcagagaaataaggttgagaacagtgaaggaggaacccagatgttgtcctccagcctctgcctgcagcacaggggtatgcttctcacatgtacacacattagagcatgtacacacacacgcacgcacgcacgcacgcacgcacgcacgcacgcacacacgcactgtacattacttattgggttaatttatgattttctaactttatctcacacacaaagaacagaacaatggtctctgaatgggattaatataatttcttttctggctgtctcttcaaattcaaggtctttgtcagtaccacaattcaaattgttcactcgacatttgagcagtagggcttgctgacttaacatggaaaggattaaaaccatagctagacaaatccatgtgttactatcttatgtgtaggtatatatgaaaatggcatgtgcaagagactagccactgttttgaacagcacatgattcaaaacatacacttccccacaaagagaaccttccaatgagctggcaaaacctgtagccacaaattctgggttactgatcaactgatatgaaacattccctgaaaaatttcattaagttgaaaaagcaaattgcagaacagtgtgtgaaatacaataccacttgtgtaaaaaacattttttgaaaattgtatttgcctaggaatgcataaaataatctctggaagagttccaaaattctggtattattatttgcctctggagaagaaaatagattatccagggagcagactcagaggtactgtttatagctttttttacatttaaaatgatgtggccttattaactacccaaaataaaagaaaaccaaaaccaaacatgctttgatcaggttcactttttaaattttattttattactttagtaaaatgtacataacaagatttaccattgtaaatatttaagagggaaattattttttgaggtaagcacagctgtagggatatagcttttttgtcttttaaagacaatatcccattgtcttcagggcagtttagcttcttgaagtaaacatgatttccattatattaagcaacatttattctgcattccttttaatgtatcttcattcatttgcccccacaaaaatagaagtctgaactttttgaatttaaattttaatattttgagtaactaaaaaccacttggatctttaaatttcctgttttaggctgggcatggggcacatgttcattgttccagtacttgagaagctgaaacaggagggtttagcaaacagctttggctgtatagtgagaacttgccttccaatagatatttttcaatgcatgtctttcaggttctctaatcaaaagacacagatcaacagattggatccagatatttggctgtgcgaaaacacacttcactagcaaagacaaacacaaccttaggttgaaaggatggaaaagagcattccaaacaaatggaacttcaagcatgtgttgcttatctaatagaatagattttaaataaaaatcagttggaaaagataaataaaaccacttcatatgaagagaacaattcatcaagagcatattataaccctaaacatagattcactgcacattggataaacctatttcacaaaacaaacagctgtgaattcaaacacacataccatctactgttacaaatattaaaccaagaggttataagtgatttaaacagatcaataataagtaatgagatttaagtagtcaccaaaaaattcaccaaatgtaaagatccctgtctttaagcagtggtagtgcatgcctttaaaaccagcacttgggaaggcaaagataggcagatctctatgagttcaaggccaacctggtctacagagtgagtttcaggacaggtccaaagctacagagaaaccctgtcttgaaaaactttttttaaaaagccctttctataatgattcactgccaaaatctgccagactttaaagaactaacaccaatgctcatcaaactattgcaaaaaataaaataaaagttctaacaaattctttttccaagccaatataatattaacctgataccaaaaccaggtaaggaaacacacacacaatgtcaatctctctgatgacctggatgcaattcttggaaattcttggaaacaatttaacagcatattgaaaacaatattcaccatgaccaagtggcttcattccagggaagcaagcatagttccatataggcaaatcaataaatatggtacatcacataaatagactcaaggaccatcacaataaattcagaaaaagcctttgagcaagtccaacatctcttcacaagataagccccaaggaaatagaaatagaagggacatttcttaacatagtgaagactgcatatgaccagcatgtacttaaagactacatatgatcgttgtacctgataaaggccagcatgcacctaatgaagatatgtaaaacagggaccacctgaaagcatttcttcaacaatgaagcaagggtgctcactccctgtggttgttcaataagatttggaatcttagctacagctacagaagaaagaactaaaacagacacagggggaggaagaagcaaaatatccctagctgaagaaaacatgaccttatacttaaaagactccaccataaaaactcttagaactgatgaccagttttgccaaattatcaagatgtataactgagaaagacatcagaaaacaatcacattcacaataccttaagaacaaacaaacaagcaaatgcctgggtgctatggagagatggcttggtagttaagagcacacactgttcttgcagacgacccaagttcaagtctccgcactcacatctggtggctcacaattgcctgtaattcctgctttttgggagtctgactcctctggcttcctcaaggcatgagcacttctgtacacactctcaacaagcacacacaatacacatatgcacataatttaaaataataaaataaataattttaatgtctgggagtaaacataagcaagaaactgaaagacctctaacatgaaatttttgaaacactgaagaaggaaattgaagactacactagaaaattccttcatgaactgatagaattaagaactgatagaactgatagaatcataaaatggctatattataaaaattatctgcggattcaatgtagtacccataaaactccaatgataatcttcacagaaatagaaaaaatcctaaaattatagaagcattaaaaaattaaatcccagacagtcaaaagaatactgaaggggaaaaatcacaatccttgacttcaagtcacgttgtagagccatagtaacaaaagcagcatggtgctgtcctgaaagcagacacagaccgtggttacagaaaaggaccaaagtgcagccccacccaattttttttaacatagatgctaaaagcagcatagcctcttcagcaaagggtgctgggaaaactatatatccacatctagaaaaatgaaactaagtttacgtctcttctatacaaaataaattcaaagttgattcgtaatcttaacacaagacttggaactctgaagtgattggaagacaacttggacaaaaccattcaagatttagaaataggtagggaattcctctgaatcctctaaaaggattaaaaaccaggaattgatagatgacattgcttgaaattaaaaagcttttatacagtaaaagaaatcatcacaggaagagacagcttacaaaatgtgatgaaattttgctagctacacatcaacagaaggttaatatctaaaacctattaagaaataaaagaaatcagtgaggagtgtgatagctcagtgggttaggacacctactgccaagcctgactacgagtttaatccctgggactcacatggtggaaggggaaaattgactcccacgagttttgctctgccctccacatgcacatcctagcatgtgaataaatacacacacttaaaaaatgtcaacaatctgcatatcagacaccctaaatgacaaatgagctaatgaacagacagatctcgaaagatggagtgcaaactgccaatgagcaaatgaagacatacatggtcaacatccttagccaccaaggaaatgacaatcaaaaactcaacttagattgcatctcagcccagttagaatgtctgtcagggagagaacagctacaaattctgatgaggatgcagggaaagagaagctgcacactactggtgtgtgtgtgtagaccagtccatcctctacagaaatcactaatggaggctccaaaaaaaaaaaaaaaaaaaaaaacctgaaaatacaagtgctgtgtgccagctatcctggttagttatccaaaatactccaaagacagcatactgtagacatgcttgtacatttatgttcattgttgaacttttataataatcatactgtagtgtcagcagatgaatggataaagaaattgtaatgtgtacacaatggatgggcctgccgttgaccctttagccctctccacccctgaacttcccaaccctggtgctggggttactgatgtgtgccaccataccctgattttctgcatgctgaggatccaaacttgggtcttcgtgcttgatggtaaaggacttcacccaccaagccatcattccagccccactgtgcggtacatttgagttcaggttccaccatgttaaaatacgcacagaccaggttaagcaattccactttcataactcattatccacccctcacacctcttcctcctctcacagcccatgcccagccttgagtatatacatatgcaaagttaaatccagatcccacaggaaagaggaagcctggagctctctctgcacctgacttactttgctgaacgcaatgatctccaggtccaaacgttttcttgcaaatgtcaagtttccattcttctttacagttgaataagttgccactgtgtgtatggaccaactgttctttgtccatccattgacaaaacagacctggcaggtctcatgtcttcacttttgtgaacaaagcaccaataaacccacatgtgcatgtgtctttgtggtgtgctgggtcttacaggggttttggttttggaggaaccttcacactgacttccacagtgcctatactagtccacattctcacactagtgtgtaaggattcttctgccacattttcaccaccctttttttttttttttgagagaaagagagggtctcaccatgtagcccttgctggcccagaaacttgaatacatagagaactgcctgcctctggagttctggaaccaaaggtgcgtgtgtaccaccatactaagctgttgttatattctttttaaaaaatttatcaaaccatgtaactttttaactgataatttatgtagtatacaggtatagggtacaaggtgatgttaggatttattaacaatttgttaaaaaaaatcatccaatctaattaacgtatctatcacttcaaataagaatttttaaatatattttttattgaatctttgggattttcacatcacgaaccccaaacccactcacttcctagtccttccatatctgccctccacccttgtaacctcacccccaaaagaaaatagaaaattaaaattaaaaagaaaagaaaaaaccccaaccaaccaaccaaccaaacaaacagacaaaaaagtgaaaacccatcttccccacccctctgggcaacaaccaggtcctctgtcaaccacagccggctgtgcatagtcctcggtcctctcttaaccacagttccacctctccatcgcatattagtttattgtagtgacattggcagctgccatgtgtcactcagtatacccttttgcccaaacagctctacttgaaaatgctcattgcagtgagtcattcctctagttcaaagcctctgacttctactacactgtccatactgaaccctcaaagagactctcagatacgttgctgctgccctgagtcatggatatcctgtggctttgaatccacaagacaggccccttcatgagctccggaagctcgtagatggaggagatgttggggtgggccaaatcaaaggcctggatctgggcctgggtggtagctgagttaattaacccaccagacctcctgaacccactccatggaggccaactctcccatgcccactccaccagggccagctctcccacaaggacagagaaggatgagaccagttcttcctcatgggcattggatgaggggtgggaccaagtctcccacactcatgccatgggggtaggtctcaggcttctttgccaccagggccggctctcccatgctgcccaggcaatggccagggccggctctctcacacttcactgctggcgccaccatgtggtggccggctcagttaggctctgggacgtcaatatgacatcaggccacagaaatctgcatgaccttgtgataacacaggccacccacatgaacacagaacttggctgcagcaggaccccagacccagacatggccctcggtcgtagcacagtccgagacatcgccatggcctccggtggcagcacaggcctgtcacatcaggctgttcctcacagccatcagatttccagttctccctcttcatgaaccacttctctgtctctcacatctctcactagatacttgctcacttctgtcacagggctacaccactgagggccaggcagggccaggtatctccgccctgttgttattttcttgatagcagccattttgactaggataaagaagaatctcaatgtagtttgattccacatacccttgatggctggggagtttaaatatgctttcacatatttatttgaaatctatatgtctttggaaaactgtcttttctgttcagtggcctatttattgattaaatgatttgttattttaagctttcttttgcagctcttgtagattctagatattaatccttgtctgaagtacaattggaagattttcccattctgaaggctgtctctacatactggtgattttttttctttgctactcataagctttgaaatgtcacacagcctgtatgtcagtcttaagagtacttcctgagctattagagcccctctcagacagcccttgccttagcttaggtattcaagcatcttgctatggtttcccttgaagtttgatagtctcatatcttacattgagggctaggatccattatggattgatttttgcacagggtgagagatttgaacacagtctcattgtcccttatgtggaaatccaggtttccaaacaccatttgttgaacaggttcttttcacaatgtatgtatctgagatccctgtcaaaatcaggtggttgtgactgtgtggacttatttctggatcctacagtctattccatttgtctatatatctggtttggcacagtatcatactgttttgttaccatggctctgcaatacaattcaaactctgcaagttttgacaccactccaagaacagaaatttaggaaaccatgactgttgtccacacagagtcccacactccacctcctgcatggaacctgtggaccccaggtgcatttagcaaggtcatgtgaaaccattagcacattcattctttcaaaaactggtaaagatcaagagacacccaatattgatcccttttataaggaagtagtaggctgtgaaatcacttgctatgctcaattatgcttgatggccttggggtcctggtgtttaagttgccttgctgatctgcagaatgctgaaagacatcattagccaaggtccagctatctgctgaggatgttcaaggcaaaacctagtaacttgactgtcttccattgaatgggtctgacctttgacaatgtgtattccatggttaaacattggcctactgcgactgaagcttatgctgacatccagactactaatggtcattttcttcatctgtcctgtgctagttttatttaaaatcacaacaatgagatagatagactttctgtgctcagcaccaacagattcaccaaaccctgaagaagatgggggtggggggatatgtggcctgagaggtgcagacaaatgactgggaagatgggtaatctgaatgcttgctgggcattatgatctgagtccagatctccagcatccatgtgaaaagtggacaatgtggtgcacacctgtaaccctggcgctgtgagggcaggaataggaggacccttaggactttctggcaagctagtcaagcaagttagggagtcccaggttcatgtctcaaaaaataaggtgagtgtagtggtttggatgaaaatagcccccagatgctcatggccttattggaggtagcgtgtcactgggggtgggctttgaggtttcagatgctcaagccaggctcactgtatctctctcttcctgctgcttgctaatcagatgtagaactctcaactacctctccggcaccatgtctgtctgcatgctgccaggcttcctgccataacaataatggactaaacctctgaactgtatgccagcccctttataagagttgccatggcatccaggcagtggtggcacatgcctttaatcccagcacttgggaggcagaggcaggcagatatctgtaagttcaaaggtagtgtggtctagagagtgagttccaggattgccaggactgttacacacagaaaccctgtctcaaaaaacaaaagcaaaagcacagttgccatgggcatggtgtctttttacatcaacaaaacccaaactaagacagtgagtaatgtaattgaggaaggctcccaatgtcaactacatatgcatttacacacacacacacacacacacacacacacacacacacacacacacaccacaaccaccaccaccacacacataaaacaaaatagaaatgaaaccattttagagagcattgggaaagacacagaaaatactttccagtctctttgtcctctctagaaacatcttcactatcatgggataacactaataaagaagcccaagcttcatggttgttataatagttctagaaaagatgcagagaatgagacaggtgccaaatgcactggcgttggtgacaaatcagaaccctgtgtcagcagggagcaagctgttctcgttgagttgtgctcagtgttgtatcatcatcagtttgcttttcaggatgctgtaaggagcagtgccaggagacacactgccttgtcactgttcttactcttgggatgttggtgaggatgtggctctttgccttacacagcatcttcttcatcaaggtccccaggtagagaactcctttcaagctcataattaggactagttacatttctgagtgtcttggttagtttccatcttctgggtaagtgtcgtgacaaaacaaagcaaaattccttctgggttggctttgtgattcacaccagcaagtgtactgaaagttaaggttagcatgtttgagaacctgtgttcattttacttctagtttcacatttttctgtctagtttcatttcttttactccatgttttaaaatatactgcattacttaggacccctagttgagaatggctaggaattcaaatagggaaacagggacggtattatgtctaataattagtgaagcttcatccatggctgggtttggggttttttttcttccctgctacataaccttgctcctttctgagactctggcctccccttacccacccctacagggtgctggcagcacaggctggtgctgtctggagacagaaattccagtagaatatttctttcatcccagaatccagacaaatttcccaaggtaagttcctgtgagttgtttagccaagcttctataagtcgatgcaaggagttccaagacttggcaagtgtgggtgccaccctcctctgagaacctgtgaggagaaggtacaattaattatactggagaagtcaatgttttccccagaggggaaatataaggacgaagtggctttgaggcaagcaaaccagaagcccatggaatccctttgcattcactcatatcttttagattgaagcagataggtttgataagccccttataaccttctaataacaacatgggccattgctaaatgcacgggaaactcaaactgtaattttccagtcgcttggtgagaatgtggttggaacaagaggagttatgtgtatgactcaaatatattatggcttcaagttctgagagtagaaccatctgtctgctcacagacagatcacagcaatggggcagctaggagacatgctgcagcttcttggtccatgagctgtccttttttcttaactactgtcggtcaactgttccaccctctgtagttatggcatagccattccttggtgtggctggagatctgtcaatcgagctagaactccctacccctcctgctgcaagcctggaagacaatctgtcttttatttatctttgtacatatctttcttcatcaatcattggctgacttcatagtgtaactatgacagcttagagaagagatgggtggggagcctactaaatacaatgaaggcaaaggatttctttaacaaaaattattgtgtgccagagttggtatgggggcaggcttaggtaggttgtttccagctgctgatggtgacaggacaatatctatgctgccaacccacttatagtctatgggcacagggagcagcagaaatacatgataaagtgggtatgcactgtacatccagaatgtacaaaagaatagctggagaaggcatcatcacacctgagctcaaatgtccactgatgtcttccgtgatcccagggaccaacacttctatggacaccgctggcaagatccttctgggattcacattagcactatatttccttgctatgagactgttcagtctctactcttattgtcttctcattcatttagctgggaagagggagaaatcagggatggtggcacccatcattgtcatttaccacagtaaccctgaatagtgaagaacagagctattgacagggatagaaccaatgttttccatgaagcaagaccaaaggtctgtcaaagggaaagccgttgcctgggctgcaaggggtgggcactaccagcataagttaaccctctgcctggtcaaggagatcagtctccacttccacctccaccccttcttagctcactgcaccctctgtgctcattcacaggcccagatctctgcttcctccagtccattcataagtcctggaatattcctgagaaatagggaataggaagatagggaaaaggggtgcgcatgtgagggtgtaatcctttaaaggggtacaaggaagcagggggcaggatagggcccctcttcatcaccttcctgcctgcttcctgcttgcttccctggggatcattgaggaaataacctgggccttctagaaaagactcacatggcttcttgatgtctaatatgttttataagaaaaaggcacacagggtggttgtgaccgaggcgacaacccagcaagcggggttgtccacccagaaagcacctctgctcccaacaatcccaaagtttctattcccaaaatggttccctacagtcacatgttgtgggagaggagagaaaagccctggggcagatgactaagatgcttgcctgcctgtctggactgaaccgtcttcaaggaaaggcttattccttacccgccttccctttccctgtcacagcaacttgactcagggtcttgcctggagtaggtctccaatgaattaataatgtttttccaaacattgaggaaaaaatgacccttagaaaaattgaaattagacagcaccctcccttcttgttttgttttttgttttcacttccccctccttattcctccctccataaccctcccatataccccctccttgctgtctttcaaattcatcaccccccttttttgttaattgttattacatgcatatatgcatatacatatatattcctaaatataacctgctcagtctgcacaatgttacttgtgtgtgtgttcagggatgaccatttggtattggacaagcggttagcattctgttccctgggaaagactatttctcctgtgctcagccttccatagctgcctgagttctttcggtagggtgaaggcctcaggagcttttccccatccactttggcatgtctatctgtgttgtccgtgttcagtttgtgtttggaccttcatgttggtgagactttatgggtgtagcttcctacatacagtctgttactgtgctcatattggtagacactatgggatataataatggataagaatcacacagtatgggagaaaggagaacacaaataaacggaaacaggaagcaatatgcacgtctttcaaagagctactttacaaagattaattatgttgttaagggcacagatatgaagagggatggagccagggttcccagcctttcttgagcagtgaagcctcaggccactggagctagagaaatggctctgtggttaagagaacttgctgctcttccagagggcctggattcaattcccagcactcacctggcacctcacaaccacgacagcaaactccatttcaaaagtagatccatgaactggccttctcctgtaatcagattggtgattacactaattgtcatcagagagccttcatccagtaactggtggaagcagatgcagagatccacagccaagcactgggccaagctcttggagtcctgttgaagagagggaggaaggattgtaggagtcggaggggtcaaggtcatgacaggggaacccacagaaacaggtgacctgagctcctgggagctcatggactctgggtcaacagctggggggggggctacatgggacccacctaggccctctgcatgtgtgtgacagttgtgtagcatagtctgtttgtggggctcccagcagtggcatcaggacctgtctctggctcttgagctggcttctaggagcccatatcctgtgctgggttgccttgcccagccttgatgaagagggaggagcttgaatctgcctcaacttgatgtgccatgctttattgactctcaggggagccctgcccctttctgaatggagaaagacggggagtgaatgagaggagggtagtagatgggaggcaggggggggaacaggaggagaagagggaggtgaagctgtggttagtatgtaaaataaatgaaataaataaataaatatcctactgccccccccccaaatttgtacatcaggacccacagccactaaccacaaggcgagtagatatgcagggagaggtggcgataagagactacaggcctgggtagctggcagaaggactgtgctaacccccatgccgcctgctgccctgcctgccgttgggtcctgggggaccttatatgtccctccagcaagtgagtctttagtcttgaggtcattttaatagaaaaagtcgctctgctctttatctatgtgtcactggagtcctttattgtccccataacctgtagtttatgtctttgctagcctctccagctttattggttcacttacctgcttggagtactcagtttttcttttatttaatcaggccaggatgcatttggcttgatctataatggaatataagcagtgagccaaagagcaaattgtaaatgtttggagagattggttaaaatctggattctgtctctaggtgcaagctgagaggggatttccaaatagcagttatttatagaacatttgtttccttcacttataaaacatcagcatattccattatctcaactcttaaaaagtctcgggtctgagaaaccatgcagaccaattcagttcttggttatagttcaggacatggaatttcagaaggttgagaatttgacattcaggcttccttttctatgaaagggttttaaaccgagtgactctgtcctgtcattgatgttaaagcaaagcactttgtgcatctcctatcagtaggaatttctccaagttcttggggtggggacctatgtcttggagaggaatgggatcaattcatgacgaactcattttccctactgttactgtctttgctttaggcaggaaatgctctcgtgaaattgaaaacctaagaccaacatgtatctgttcacacatttgtccttctcagtactctatgtgtgagtttccattcggttttgttctttctcactttaaaatttagggagttttttctttttctttttaaattatttcctttccttttaaagattgttatataatcatttctccttccaagccctcctatatatcctggcttgttctctttcaagtccatggcctcctttttttattagttgttgatacatagacatgtgtaaatgcctgctgtttctgtatacaataccccctgctcagtctatacaatgttacttgtgtgtgtgtcttcagagctgactatttggtattggataaccagttggtgttcttttctctggggaagattatttctcctgctcttggcattcctgtaggtctttgtgtagagttgaggcctcatgggctttctcccatccatcttattattgaacttgttcagctcatgtttaggaaatcatgttggtgagacttcatgggtgtagctttgacattcctagaagacacagtgtcacagaaaactccctagctctccagctcttaggacccatctctttgctccctctcctgaaatgtgccctgatctttaggtgaggaagtagtttcctaaataggacggggctccacaactctgcattttgattgggtgtgattttctgtaatgatctctgtctgctgtgaagagaagtttccttgatgaggggtgatgaccaagataaataattgaattgttgttagggattattctgttttaacgacgtggtggttggaggttctcctacaatatctacgacttcattagtaggtagttggcaaagttttcagcaccaggcatgatttccttcttgctgagtggtagatatcagtacttaatagagcatctgtcaaggtctaacaggttgagagcagatacagggactctggaacaagaccatgccatctacaacaaagaatagactaccacttggggtcatggtacacacctggcctttgttgtagagattccttgttcctggctgtcacctatgaactcttaaggagctccctgtattcaaccaatagcagaagcaattgaagtctgcttcataaatgggtgacacatcgtgtgtgagtcacatcctggcattcctcagagctaccccaagggacaccgcttacagaatactcgttccattcagaaagactctgtttatataaagtgagagacagactgagatacatacacacatgggccagagaaaagtaaatgtctatctagcaagggtaccagaaggaaactgagtggaagaccagagagaagggagtttgggagtcatgtggaaatgagaggagcctgcctgcaacctgaaaaaaagcaaacactgaactagtccttgggctaaattaccctgtggaaagaagccagcgcctcctctcagccactgtggtccttgagcaatgggcctgtaagtgaccgtcacagcagggatgggtcaccaacgggattcctctccttgagactctattagtaattgtcactcacagttaaatgccctcttgacagctgcagagactgacactgagaatttgttatgccactctatggtgagggaaccagttggccacactacagcactgaccattaatcttgtgattactagactattagaaagggctctgtagaagccttccacactggaggaagcagtaatccatccttatcttaactgacatctaccccatctgaatgtgctttttctttctctgcctccagtgctgctcgtcacaccgcttctaaggtctcacagaatgcccagttgattggtatgctgccccccccccccgtaacacagatcaatgagcctaccttacggtgaagataacatcttatccaacagacccttatggaaggcatttttcctactgtataccaaatcacctggaggtggccctgctatggcatcttctcaggaagattacagaaccagaatgggttattttaggatgcagtatatatagtgaaccaaggactggtgtgtggctttgtggctcaagtggctataatacagtgtctgggtctgacactgtagccatagttctcaaggactcacttgagaatgtgtgcttccgattcctgcagctctagattatgttggatcagcagtcctttttctgtgggctgtgggggaaggatgtttcataaggggacttagcaagattcttctggatcggaaactactattagcattgggtcactgttggcctttaaggctggtgggccaagagacagatccaagagtaatcttattaactcctttccttacacaagtgcctcttctgtgtgtgagaccttggaggtagtgcagtccctctagagaggtggttctcaacctgtgggtgtcaaatgactctttgtaggggtcacctaaggccacctgaaaacacagatatttacattatgattcataatagtagccaaattatagttctgaagtagcaagaaaataattttatggttgggggccaccacaacatgaggaactgtattaaaggatcacaacattaggaaggttgagaaccacagctctagaggctccagggaagaatatgttttcttgtattttccatttatgatctacatttcttggctcatggtcccttcttccacctccagagtcaatgatgtagctctctctctctctctctctctctctctctctctctctctctcttctctctctctctctctctctctctctctctctctctctctctctctctctctctgcctctctctctctctctctgtctatctctctcctttcaccacactgtcttattcagtatttaataaaatacctagtttccaaaaacacttgtgtttgaactaagggatcacatagacaatccagactaatttattatctataggtgtttaacttaaagcacatcttgcaagcctagcacaatatctttgggagccaccagaaatcatatcatatgggattgctaaaaggacctgcttgggctttccagaacctacagaagtctcaggactggaaaagctaacagcttaaggttctacccttgtgtagaatgagagctcatggctcttcctctatctcactcttagaaaagatgacacactttctaacacacagctatcaagaagtctaccaggattggaactccagtgctcacaatggcaaccagcccaatagagtggaaaaccccaagcatactactccccctgaactccaaactctcaaattaaaatatatactctctattacttctggatatctaatagatgccttaggttcaagggctccaaatcaaactccaatttcttctcacctggaacattcttccctatttggtggatgtcagttcatgtctctatccaacggctcaaataaaaacttgatgtcatcttggactctgttttgttctcacaccttacaagttttccatctaactaggttctaccttcaagcatagccattttccatgcactctttacttatctgctgcacccagtcacgacacccacttggcctactctactattcttccaattgtctcccaacttccacccttgccctgcagtcaatgctcaatataggtgacagaagagctttaaaaatttaagtgtcaagccgggcattggtggcgcacatctttaatcccagcacttgggaggcagaggcaggtggatctctgggaatttgaggccagcctggtctccagagcgagtgccaggataggctccaaagctacacagagaaaccctgtcttaaaaaaccaaaaaaaattaaatgacacttaaataaaaatatagattcaagtttttaacatatgtgctaccgaagcaagcactagattcacgtttttttttaaagccccttctgtcttcaagctctccagtgttcatcttgtcctttgaaaaaatccatatactgtcaataatctagaaagttctgcatgatctggcctcattgggctatagccatcctgcctcgtggatgttctcagagtactaagtgcacttctgcctcagggattgttcacatgctgtgtgctctatttggaaggctctgtcatcagatacccatgtcaatttctgttcagtcctctctttggctccttagaaaagaaaaaaagaaccaaccaaacaaaagcatcatcccttgctttgttttcctttatgggattcttgcagtctacagtacattcttgcttatatgagtaccatttatgttacacacacacacacacacacacacacacacacacacacacacacacacacaagtctctttcatgggagcaaggattttgttgtattttttagctttgctgacataactttcagcatataaagaatgggttaaatattatctttcacctggtttgtggagaagacgcctcaggtggcacaggatgagaacttagatattctatttcttaatttaatgatttcctcagtgctgtagttgagacatgcatggccccaagttaaatgagaagatgccttttacacaggaagccagttgaccatagcttgctcagaaaacaacataacacaattaatatctctctaggtttgtttcagagcagctcaaattcattaccagtatgaatgaggaaagagtttttgtaagtagtctagacatcttgtccaagtagcacaaatagcacaaaattcagaaaaacggaacttagaatattctaagttcaaagcaaaccacagaattcaacaacatttaactgagagttttcatcctattaatcacttgttctcagacagagaatgcagctcttgtagagtgttggcctagtatgcacaaagccctgtgttaaatccccagcatcatgtaaaccaggtatagtggaacaccattgcaatctcaatgcatggaaggtagaggcaggaggatcaaaagttaaacataattcttaggtgcatatcatgtttgtcagcctggaatacacactacattgtctaaaagcaagcaagcaagcaaacaaacaaacaaacaaaataatcaggggctgaagggatggctcagtggtaaacagcacttgctcttgcaaaggattggcgtgagtttctaaccccataccaggtagcttacaacagctccagcaccagggaattcagctcactcttctggactctctaggctcttgctttcacatgcacatatatacacacaattaaaaaataaaatatttttaaaagatcatttttttctatatattttatttaagtatgttacctggaaaatatagccattcgtataaagttttatatttatttggtttatatttaattctcaaactcattttattttcaaaaacagatatgaaaattattttgttcttaactgaaagtcaagtaagtaaattctctagaagatgattatctaacaagatagccaaccaccagaggacaacaagagatgtgttttcaaaaggagggtggtgggcaaaaggttacatgtggcctgggtatagttagtggtggctcagacatttaataccaagaccctgggaagcagaggcaggtgtatgtatctctgtgagtttgaggtcagcctaatctacaccaagagttcctaaccattgaaggctacgttgtgagactctgacttaaaaaaaggaggggggcacctgtgacatggttacaggatgtctaaggcacaagaaagggaggaagatgggtgaggaaaaaacaacaaatatgattttcaattcaaaaacacgatgataaagcctaattctttataagctaacacaaaatctaaaaagaaatgaatagaatctatggaaatatattctctctcatggcatagcgaaacatccttaagtttgaatcctttacagaagaattgacttttcccctgagccttgggttgactgagcatccctgacttggtcctctacatctcactagtgtgtctgtgacaagctgaagaactgactgtgtgtaggacaaaggttggtaaacctcgtctgtgaaggactgcctgagaaatatatccaactctacagggtcatcaaaagccatgtggttctcaaacccctcatctacatcaccatagtgtctgtatatgacccgtgtatactcatgtgaattgccataatgtccacagatgacctgtgtacactctcctacatcttaaattatcagtagagtacttttacctattatgtgtaaatgctgagaccagctgtttggttccatcatttaggaatgggtggcaagaaaaacgttccatatattttcagcactgacactttttctttaatattttctttctgtggttaccaaggatacagaggcagactgtattttaggttttgattgctacatggtctctgtagctaatagtcatgtctgcactataacaaaaatgaccagaccatgcctgaagagtgtgtgttctgagaatggtctatttgtaggttctatagcctgaactgtgtgtcttggcatttggtgattcttttcatttttctcactatgaaaactatatatatgtatttgtaaacacacatatatatgaaataaaatagttttaggtaataggtcatacaagaacaggtactgtgtcacatttgtctgctaaatgagttcacccatataagcctgctggttgttgcagcaactttggtcccctacacaaagacccttgtcttctaggattctggaaatttctgttcctggactgtaggcagtattctaagatggggaggaagaaatttccaagcttttgagaccaaagctctggccctcactcagcatggccaaggcattttaattcagagtaagtcacaagtgtggctcagaggggagctgaccaccaccacacctcttgctgaagggcatggtgccacattatgtaagcttttaaaaaaaatctatggaaagtgaatgttaccaattgggtttgtcccctcctccattcctgcattaaaatctgaacacctcatagctcaaactgtgacgtttgaaaatggagtggtagcatatgtgattggttacaatgatgtcattctggactcctgtggtcataaatcaacagtcacattcctattagtcataagcagaaagggcattggcagacagatgtgcaaacaaggaaataatctatgaactgtaggtaaagatggagctataagccaggaataccaaatcttgctagtttattagcatggtagcactatcagaagaaaggaccacacttgggttgaacaacagtcctgcaggttggaaggctgaaagcatggtatccacaggtacttcttctaatactagagagagatctgttccccattatcccccttgtatcttgcctagattgaccccaaacactcggcattaagcaatcctcctgcctcagcctccttagtagctgctccctgtatctttatattgcttttcttttgtgagtctgtatttaaattctctcattttagaaggatgtaattcatactgatttagagtcctctctgatgatttcactataacttaaccctgtaactaacttatctccaaatcagttcacattccaaagcacgagaggttaggatttcaaagtaacattttcatagagacctagttcagtttacaatagacagaaagccatggaaagaatctgctttcttggtgttctcagatggaaacaaccctgcttacatctcggtttcagacttccagtcaccagactttgagaagagaaacttctgcaatgtgtggtcttagtcttggcagcccaagaacttactagaagtgaagatggctttttaagagcttgaagtgcagcttggaacccatggctggtttcaccacattgctggcttgaagtttagacccagatactggggttcaaatccgttgaccaattcaaaatactctacaagttgcttggagagactttacatgtgctactcacaagctccatcagatgaaacccttcatcattcacacgtttccaaaagatagatccaggcaataatattcatgattttaatttacattccccccacacatgaaagcataagttgaagcaaaccaaccaccagaaaccaaaatattcagagatcaaaaagtggcatttgatcacatctggtgttatttcatttaatagctgaggggggaaatgtgttaaaaatgcatgactttcgtaaagccaggaagttccagtcataggtcactcactggagctgggttatgcaaatggctccatctccttgccctgggcctggtcctttttcaaatgactcctcatcatttatatttaacctagaaaaataatgatgtatgctttaatttcaagttagagctgttttgtgtttttctttttttaaaacatatctattctcatctccattttgcagagcaggatttattatttccattttatggatgataatgctaactttaatgagtacttataatcaattagaggaacaaagcttggcctcatcatcaaatcctaaactcagcccactttctgctgtggaaaaggcatcttgggaattaaatccagttggaccacagaatcagattctcagatgttgctttaacttgctgctgtgatttggatgtgttgggctgtaatctcatgtagagattgcagaaatatgccaagttaatctaactatggtatttaaagtgaagcctttgggagatcagtaggattagaaaagacctaagtgagtcttccattactaaatttcgttgtatttctaagaagacacacacacacacacacacacacacacacacacacacacacacacacacacagagtctgtcattctatgacatcttctgttggttctggaactcagccagagagaaggccatcacccatttcagttcttgagcctctagaacactgtgaaccagataatgtttgtgtgtgtgtgtgtgtgtttgtgtatgtgtgtgtgtgggggggtgttggcacccttgccgtagagcatggatagaggtgagaggacaatttgtgaagggtcagactccccttcttccatgtcagtgacaaagagtgaatgcaggtcatcagacttgataataagtgtctttatgagatggaccatcttgctagactcctggctgaagttaattcaaggcagtaaggatgcatacatggcagggcaaagccaagaagagtctgtggacaagcaaaacaatgctctcatccaacactgaacagttcatagttgtaggaaaaatcgggtaaaactctttaaagatgggagaattagacaaggatggggatgcaggagccagtactagtgatagtaaaagagagggaacgtgaaagaagggtataggtgcttggaaggggaacattgtgagattcatctccgtcttccctggcaacgacccagctcagttttattcctaccctccattcacacataagagactgtgaaacttgtgattggatgagcacaacaagcctgagcttcatattttaaatgctatggcaagtgatctggacttttcaaactaccgagtttgctgtttgtttgtttccttgctttgtttttggcgagagagttgtttgtcggtgtgtgtgtgtgtgtgtgtgtgtgtgtgtgtgtgtgtgtgtgtgtgtgtgtgtgtgtgtttggctctgccattgagtcttcagagaatgtggcaaaatttccaaatgtctgaggtgggcctccatttccctttctgtagaagatgaggttgcacaaaatagatcagagatgacctatttgtgacaagtgtactgctgttcttcccaattctgatgttccttcacaaacttaaccaatggctacaccttccttgctaagtcttaacacattctgtgactctttatcaacgtgatgcttccaggctgtcatgatccattgatgcagatgaccagcagaggagccaaatgggcactgcacagggagtaagacccatcttagacccaagtctcagctatgttggctgcattgtaacactgagtaatcacttaaccactgtgcctcttagtctccttttctgttaagatctgaaaatgaccccttcttacaatggccatctgagagcacagatatcaggctttgcaaatggtttgggattgcgtgggtgtgtctgaacaattcttgctccggtggtctcggtgaagtcttgcatggagtgtgtgctgtgtagatgactgtaggtgttcagaggaaggtaaacagatgatgtgtgttgccagttttctccccagctgtattcagaatggggagcttagccataagcacaggatttgaaaatgcagatggcaaagttagcacacgatgctggaatcccagatctctttcttcctcccagctatgaggttttgagaaaatcagtttaaagcaatggacttagtttctttatctgtaaagaggagtatgcagtaagttataagggtacactgaggtttttaaaatgaaccgatcagacatcccaaagcgtggcgcctggcaggtggccagcaaagatttaaacaggtgggactgggaaggttacgttatgtaggttagaatttgtcccacagagtcttgctgaagacttcaaaaccttttataatcagttccatgagctgtgaattgaagtggaaagtacccctgcctttctggcttggaatcccctagaaaaattgtaaaaagaaaacagaaaaccagacctgggggcctggcaagctacttcagtggttaaggcacctgctgtgcaaacatgaggacccgagttcagatccccagcacggggacctgagttaggatccccagcacacacataaagcatctgatggcaacaagatcctgtcaacccagcaccaagtactgagggtgggacagaaagactggtacatcccagaggctcactgaccaaccagtcaaatgatcatctccagggttagtgagagcctggaatagtggtttatgcctttagtcccagcacttgatgggtagatctctgagagttcaaggtcagcctagtcagcatagtgagttccaggtcaaccagggatacaaggtgagatcctctgtcatcatcatcatcatagatgaagatcaataaagaaacacctaatattagcctctggcctccacatacacagaacaagcacacccacatacgcatgtacacatacatgaacaatgcacacagtgataataatgaaaaggaaagctgggctgtagccccaacatagtgttcagtagcctccctcccacatccctcaacaacaggccgctgtccactgtggctgaagttggctcagttcagaagactttctgtacattctaacagtctgcattctgagtgcttagttaatcaaagtactttaataaaaaggtgatctccccatgggtcccttagaaattttgcaggcagtcttttagtcaaatatcaccacatagtgggaaacatgtttctcatatgggttaggtctcaggcaaataaaattatcccttatcctttactccaagaaataagaaatctcagtgcccagagaagctaggtaaggaggaccctaagagggacacatagatcttcctgggaagaggaaaaagaggagatattctgggtaaactgagggcaggcagaaagggggggcgtgagggatgggctcatgggggatcaggatggtgggttgtcggcagtttggaaggggagagtaatgaaagagatatcttgatagagagagccattgtggggttagggagaaacctggtgtcagggaaactcccaggaacccaccctcaaggatgaccccagctataactcctgtcaatagtggagagggtgccagaactggccttcccctgtaatcagaccagtaggtgactaccctaattgtcaccagagagcattcatccagtaactgatggaagcagatgcaaagatccacagccaagcactgggcagagttctgggagtccagttgaagagaagaaggagggatcatatgagcaaaggagggggatcaaggtcatgatccacagagacagttgatctgagcttgtgggacttcaccgactctggacagacagctaggacgccagtctgggagcgacctaggctctcttcatctggctgacagttgtgtagcttggtcttttgtggcagacacccaggaccaggacatgtccctgactcatgagctggctctttcgaacttattccctacggtggatgcctcacccatccttcatgcagagggaggagcttggtcctgcctcaacttttgatatgccatgctttgttgactcccatgggaagccttaccctttctgaatagagacagaggagtagtggaatggggggataaaatggaggcggtggggggggaacaggagtagaggggagaggggaaactgtggttggtatgcgaaataattttttaaaaaagaaatgataaaaaaagaaatctcagtgttctagaaggttttgggctatagccacggcaggaaataatagaaatttttgacattttagaacctctaaggtagccaatttctttggacattctttcaaaaagagagtgtgtcagaaaaaaatctttcaatagtttcattgttgtacctgctctaataatctaaggggagctagggaagatggcttatgcttagcaaaataatcataacagaggtaggaatgcaaattgatgtggaatggaaaattgactgtattacaccaagaggccacagccagcagaagcctttgctgcttttataaacagggctctggctgcatccctttcctccctgacccgaggtgtctggatttcagtggaccgtcgtcgctgacaccccgtggtttccttagttttgggcagaatgcaagcattgctcatctatggtgatctcagccctgactgaaacctctgaccatatttgggcctctgtaatgctcactccatcaacagaaatgcagccgagcagcagcaggcagcaggcagcaaccacagccaacacagaaagcaaaaaaaaaaaaaaaaaaaaaaaaaaaaaaaaaaaaaaaaaaaaaaaaaaaaggaaggtgggagagggaaaaagatgaaaaaagggcggacagccagagataaagtaatatgctgagtcccactggagagacaagaacaccctactcaggggtacagatgggagtggggagaccaacttaaggacaagaaagacaggaagagtcttgagcctaatatgtgattatccgtccacatcggtacattaatatagaatatgtgggtatcctcaacccactccacatcaaaaaataaaataaatagcatacacaaaccaacgtaatggcagccccaaaaagacccgaacccccattggcacagagtgtggacatggtgatttggtttgtgtagtttgtgcaaagaacatgagacattaatgagtttgattacatccacacctcttaaactacagagatcctgtctcacttttactgggaatttcagctctcatgtgagaagttctaagcggtaccccaacacttttgtttagctcaaagtgcctacctggttgtatttttttttaatgttgttgttttttctgcttttatttcttactttttttttttatcagaacagggttcaattttctggcatgaattctttccctggaaacataccctgcagtgctcaaactctctagctatgatcccctcaagtttgactgacttgccattttctgatgctggaacgagttttttagaggaaaatcatggtataacaccacctccactaacacacacacacacacacacacacacacacacacacacacacacacacacacgtgccctggtaagaaccttgagtgttggggagtttccaaaaggacactccaagaaactactggggttttgtctctttccttatgatgatgtatgacttccatgatctatttgttataatactgccccgatgtaaaatactcatacagcataaataactcctccccatgataccctagaactttccaatctggaaatctggcctgagctccctgctttaaataaaccacagacagatttttccaggggaagacagcaagttcctatccagctaaagcagtactttttactatatttattcattcttagtatgcctggctacatggatttggcagatattttgatgccatattgtttgttgtgcaaaaaagtgctactactctcacatttttcagtgttgtgtcttctctccttgttctaatgtattgctttttgctttgtattttattcttcttggtactattattgtcttttctatgtattttagtagcatttacatgctagcttcttccagccttttcttttttcttttttcttttgacaagagtctcactctgtagcccaggcttgcctcaagcgtcatggcctcctgtctcagcttcctgaatgctgggatcacaggcatagccaccaccaagcctggcctcagtgtcattctggcataagcgtatctctcatacacagcatatacttgggttttcattcttttacagtaaataattatctctttgatgttcttaagataattattttcattcctttttttgtcttgattttttgtagtaagatatacataaattaggttttttttaaccttgtgtaagtgtacagtttagtactttaaagtcataatatgcaactgtcaccaccactcagctccataactcctgacacatggtaaaacctaccttcatgttccaactccctacttctcttttccccagcctttgaagacactttactttccgactttttggttttgctttaatctaagtgctgatggtaagtgagataataaagtgtctctggaacgtacctcactcagcatgatgttgtcaagttccatccatattgtatcataagccggaacagccttccttcccaaggcccaatggtatttgattatatgtaagcactatgcaatgattttctgtttatctcttgatgaacacttggtatgcatccccgtgttaacctaggctgctataaacatgagtgtataaatatctgttcaaggggctggcgagttggctcatcagttaagaacaatggctgctcttgtggaggaccaaggtgggattcccacacccacaagtgactcatagcagtctgtaactccaatcctagggcatttgataccttcttttgtcccttttggcaccaggcacaaatgtgaagcacatatatacatgccggcaaaacacccatgcagatataaaataaatattttaataataaatattagaaaagcagacatctttgcaagttcttgtttttaatcatcttaggtgctagccagaggtagaattgctagttcctaagattagctgtcacttaaggggcttatttaactcattcatgtttagagattatgaatggatctgccttatattccttccactttaattcagatatttaaatttttattattagtggtgtgtgtgtgtgtgtgtgtgtgtgtgtgtgtggtgtggccatgtgctgtggcactcgtgtggaggtcagagggcaggtttgggcagttgattctcttctttacctttgggtagttttcatgtatcaaacccaggtcagtaggcaactagtcctctatgtgctgggcccatctcaccagccccctttgttcatatattacactcatgtatttactggcatattcaataaatatattacactcatgtatttacttctatattcaacaaatattttcctcactctcttactctgggaaacaggatctttggagactgcagatgagttttggttgtaaccatggtgatgccgacagccagcccaagtgcaccattagaaacaatatctgaaaggaacctgtcttcaagtccacaaaggcagacttcgtgacaaagctttctgattagtgactgccatttgcactaggtaggagtcagcttgattttgaatcatagcccctccctccacattcacttgctgtgtgggtttgagtatttaattagcctctgtgcctgctaatgattgaagagctagctcacctggagcaggaaagcatttctcccatggatctaggctcagagaagggtctgagccatgtctataatatatatatacaataataacatgcatctccttcactttgtagctgcttccttttcagagctggggtctggttggtatgcagaaggtatgtgagctatgtaatctgcttgtcatcatgagaggaggcaagtggcaggccgttggttgaagcacatccggaggcctgtggtgggccttggaattcctagataaggaagtgctaagcagtctgcaggcttctgcctggagaggcagaagcatggtgactctgagggccaccaaataaggaaggacatcatttttctccccttatctgtgtgcatgccagtgagcagagctacttgcctcattcatggcagcatccccaaacatggtgggaagagacctaggtgctgcgctgagctgagaggcacagcaaggaaacaaacaaacactcctttgctttttcatataacgtctcccctttcctctcttacctcctccttctgttgacatacgtcatctacctagaaaagaggacagctgtcctttcccaaagctctggtgaacctgccccacccagtatgactgacccaagttggtgattttgatctgttgccaacctaaactggctccccaggcaccatttggtagatttccaggggccgtttccttgccaagcattccttttcagtgagaggacattttttcatccctgataaacaacccaggtcctgacagagctgagagggtgcctggctctcctcgctgctcctccacttagttccccgcagatcggatccctgaggcatcagtggctctgtgaattcctttgtgaaacccaagacccttgtctctataggagagcagaaatccccaaggggctttgtggcttggggctgagacatgcggggtttatctgaataaagatatcttaaccttacggaccacggatctcataataactttgggctccctcttccctgaagatcagctgctggcaccaggagagtctgtgtttgcaaacttgcctttcttggattcagtttagaaagctcaggcaggctcctgcaatgggagagacaggatcaccttgcagatcatacttgcaatctacggaggaaaaaggacaagcctggggtggcagggggtcaggtctgttaaaaggatctgaacccagtcactattagaggactaatagtgtttttccacttcccaggaggctggaaagcctcatgtgccctccaagtgccaagctggaggattcgaggtggggcaccagataatgaattccatcacttggaaggcagaggcaggttgatctctgtgagctcaaggccaccatggtctgcataaccagagtctgtctgataaaaggggtggtcaagagaaatgaaataggcaagaggttgtttgtgtagctcctccctcccctgggtccccccccattaccctcctttctgggcattttatttacagtttggcaatttcttaatatatatttctttaggctggagaggtggttctgtggttcagagtgcttactgacctctcagaggacctgggttcagagtccagcatttacatggtggctcacaaccacctataactccagtttcagggtatctaatgccctcttctggactcctcagacaccaccacacatggttcacacaaactgatgcaggcacacccaaattcacataaaacagtggactcatacataaatctttaaaatatttatttttctttaacccaatttggaagtggcctggtaagttatcacctcgtaggagcttggaagactcaaaaaaaaaagtatcaaaaggtatcaccagtcggtagtggcttatgcctttaatcccagcactctggaggcagaggcaggagatctctgtgagttcaaggtcagcctggtctatagagtgagttctaggacaggctccaaagctacagaaaaactctgtctggaaaaactgaaaggaaaaaaaaaaacacccccaaaaaccacccaccaagtcattctggtgggatgaaatgtagaaagaatttatctacctctgcactggggatgaagcatgccatggcccctgagggctaacagtcagattttctcctgaatatagagtggctgtctgagtcagtgtgtgctgtctttgttcagtcatcagaatagtccccacaccatttccagccctgttgagtgacaaggaaacaggtcatggtgaagctcttctggtcttatgggtcttttctctaatctgctcagctgacctcacatggagagcacaatgctcagaggaacccagttctgggcattgctctggctccatggagcctctgagaaatcacctgaagagcagactggctgctccttggtttgtcccttccaaagatctatccagggaccttcttctctgtagtttaaacactcagtgcctagtaggtgccaggactgctgtaagagctcagtgtatagagaaacttatactcttgcttcaggggactttagcctgagggttcccgtcttactaaattttaaaaattttttgaaacatgtagaaagatgaaggaaaagcacctgcaccatctttcccattcattgactgttcgtgattatatttgtctttggtgccatgttcatgtgtacttttcccccacttctcttgttttctggacgtgtagagcatgtacctcattcctaagtgctcagaatgcatcttggaagaataagatgattctctttctcttgcagtgatgatacacctttaagtccagaactctgaagggagagacaggtggatctttgagttcaagaccagcctgctctacagaggacgttcccaggatagccaaggacacacatagaaaccttgtcttcaagaacaacaacaaaaaaaaataaagaaaataaaacaaaaagaagggctctctttagttcaaccatactatctataacgacacccatagctctcattgtcctaagaacacatttttatggcatttgtgtttaagtgacaggatctagctgaggctggttcctttcagtccaggacaatctctcttgaacatttcctatcacaaagccttgtgaagaacccaagttgtctatctgtctcatggagtgtactgcagtcagcatttgtctgcatgttgccttactgtcagattcgggttagacatttttgcaaggattttacacaagtaatagcttatgcttcttgttgccatactttcagaaatttgtaattttgggaaatgtgacaagcataggttaaataaacacacactgaattgataatctgtctctgtatgacctcttcaggagccacatgtttcaaaaggtgaaattaggggactggatggaacaatatcaaagccttttttaccttccaaaaaactaaaactcaataggagcaaccatagagggagagtagtagctcacacatatcccatggcagggacttgtaacatgagttctaataagtcttaatcataaaagcctggggtcagacataggggaaatgctgagagatcagagagaaggagcaagccaaagccacctttacctcactagctttccagcagaaaagagagcaatttcctactttctcctacttatattcttttctacacccaaccatctcacttcctgactgtctatacagacctccagacctctatggttagctagtggcaagctccaccttctgatcttcagacatgctttatttgtacaaacaagatatcaccacaggaacttcattttttcccctctacctttgaacaacagaaaacactcaataaattgttgttggtggtgatattgtttcctgggattaggttgagacaaacagactaactgccaagatttaggtaagccacaagaaacttttgtcacaacacagctctgatgtgccagaggtcttagtccttggtgtctacctgcctgcccctgaggatttcaaagggcctggggatagacaatgcaggagatttatagtgaagatgacttgtggcagtctctgttttattaggaacctccaaactgcaccgagacacctttttttctttttttgcaataatctttcttgaagtcagaaattgcattttgaaaacgattttcccctgctttaataaatggctaaaaatgtgaagatggattttcttcctatgtttgcagtcacagaagcatttatctctcatcccaagcagacatcctatgtaattgggtgtgtgaaataattccaaagttgcatcagaatcttttcagagcgttgctatgacaattggacttcttttgaaaaatataatctaaaaagaaaaaaccgcccttgcttcattaccaattctccaccatccacaataaatttggcctttcaaaaagtagaggggggaataattatgcaatcatattttaactgattcttcttgaagttgcaatagatagtaaagtcaacctgatcacagactgagaatgatgattcttatgacttttggtttctaaaactatggaaattagtgaagaaacctaaacaataacctattgtttggagaaaatatgaattttaatagaaagacacaggcaacccttctgacccttaccacaaaggaaagagctttggtgaggcagagcagagacgataaagcagagggttgatcaaaatatctaatttgcagtgtggtggtatagcagtaatcccagcactcaagagaaaaaggcagggagagcatgagttcaaggtcagcatgggcctcacagtgagacttctccttttcccccttctcctcccccttctcttctttcccttttcctgttcctctctttcttctcctctttctccagtctttgggggtactttgtaaacctgaaaagacaaacgtattcaaagtaaacactatggttggtttggtttgggccccagcttgatgttgattttttttttattttattagttcaaattaggaacaagcttgcttcagatgtcaatcccttctctctctccctcccctcttccccaacatcccacctgcccctagccattccctctccactccccagacaggataaggccctcaaaagggggctccccaaagtctaccacatcttgatgttgatattttaatggatgtcaatagaaaatatggcattttaaaaaaacctcagattggaggggtatggctatgctgttcactgggctggtgaaagccttataaccatgtttcttttttgaagttttggagaatcagtgttgcagtctatacattgtgttgcaattatgggtatttatttctacttttttgattctgtgatttccaaagtttcacttaaattttagaccctatggtggtttgaataaaaatggctccgataggcccataggcctagagggagtggtactattaggacatatggccttgttggaggaggtgtggccttgccgaggaagtggtcactgggggtgggctttggggtctcagatgtccaatccatattcaatgtggcagtctcttcctgatgcctacaggtcctcatgtagagctctcagctgactctccagcaccgtgactgcctgtgcgccaccacttttcccaccatgatggtaatggactaaacctatgaactgtaagccagcccaattacatgttttcctttgtaagagttgctatggcattgtgtctcctcacagcaataaaacccaactaagacagaagttggtaccaggagtggggtattgctgtgaaaagcctgaccatgcttttgtttggaggatacggactttgggactttcagattagaaaagcagttgagtgctttcagtggggcttaatggaccatcctagtaggaacatggaaggcagtggtgctgagggtcatttgaactgtgaggggctggctcaaaaggtttctgagggaagaatatttgtatgtggcttagagatcattcttgtgatgttttggctaagaccatggctaatttttgccttcatctgtcagtgtctaaattgaagaattttggattaatgacattggcagaaaaaaatcacaaaatagtttagtattgactctgtcatgtggctattaatgttcactcttatgcagacctaaaaatggagcaagctgaacaagaaaaaacataaaatgtacatcttgaggaagaggcaccaggaagtagactagggcaaagtcctgtgttcaaagagataagcagattaaagaaaagcctggtattaaatgtggtaaagggaatggtgatttagcataaagttgtaatgagacattagagtgggggggggcatggcaggagagggtgaccaaggcagagggacaaacatgccaggcaaacagagtttaagtgagagttttattacaagggggagggaggaggaaggaaagagaaaggagataaagagacacagagacagagagaagacagaagacagagacaggaaaagtcctgtctgccccagggaaacaataggaaggagagagcagggagaacaggaagagagcagaaagagaagagagtggagagagagaagagcctgaaagagagcaaaaagagcataagtgggtggaggtccttcttttaaaggggccctttgcacctttgtgcacacaagtactcatggaaccctgggctgaccagagtactgcctgagtgcattctgccaggtgacagggccaggctagcataatgcctgaatccttatattcccacctttatgtattattaaaaggtgaggagttaggtgtggcaggttagggaataaggatgtctttagagttctcaagactacttgctgctgacctgggggcatcggccatctttgggggacctgagaaagctggggtgctgccatgtcctggtgtagctgggtgtttcatcacagttcaggctctatggaactctatggcacctcttaagacctggcaagatgttggcagagcagaggacaaggttaagtttaggaaaaataatttttcttaggtcctagtacttgggaggaggaggatcataagaggaggaagaggttccccaggggttcctaagatgagggaagggattcccaggaccagagaaaggttaaataatatttatctgggataaatctgacctgtttgggtgggttcaattcagctccctggaacttgcaagactcctttgagtttatgaaaacataaattttagacatattagcagtatactcatgtcagaaatgatttggttgaaaccattaatgttcttaaaactgacagatatctttagcccaatgaaaagcaccttaattttgagcttgcagttatgattgtatagtggtatagtatggtgtttagtactctgtcagagttggattcgtagcttatcagaactttgttgactaatgttaaactatgaacagtagcataatgagaaagaaagaaatctgataacttgcatttgtataccttaagttactttgttataccttaaaacgtttgtttaaacaaaggaatgacaagagctacactgaaacctaccagccatcaaactacatcagagttcttgagaaggatgaaattttacctgcattaatgattagagaacagagacttcctagctggccacatggacagccccctccatagttgttgaggtcagaagctttaaggatgcccaccttctgctgatagcatgggacctgtggagtaggagcttggcccaagctacatggagaaagtcaattccactgttctcttgtccatggtccaaagagtcctttgcagcagttgatgtgaaaggcagtggctagcattacaacctttgtgggtggagtttcttcagtgtccagtcttcttggaggaaacagggtggtgccagcaaatggcctgtctctctgttatgaaaagctattcaagaaaacattttaaatgccatattctctatatctctgagcatttgagggctgttcatctgtttagtatatctcagcagacaaaattcgtctttagttacttgccttaagcactcaggtggctttatcactgtaattaattaatctgtacttagtatggctacaatgacattagggtagggtttgtctggagaactggattcaagcggagaggctgtggagggatgttttactcagagccctccagcctaactgtaactggttttaacttagtaggctagatttgtgcctgtaaaggacaaagtagtagagaaaaatctcccttaatagaagcttaactgttgcaaaaagcttacaggatggactggttggtgtaaatattttgttaatttgaaatagacctttatagccttaaatgtttaccgtcacttaaagatacatagcaatttagaaatatttgaaatttagcacagttaaatttaagttgcatatagagttagcttacattcacgtacataaagttatatttaaatcatctgtacagagacacaaagatatattaaacaagactgggtaaaagtaagaagaatgggagaaccagagtgtaatctctgatttgcacgttgtagtgaacatacaagacatttaaagatacagagtagacttgaaactaccagatccactgcagatgcaacaggcaaggttttgtttttgtttttgttcattttgttttccatgaaatgtgtgccctaccaggccctggaaaggcacaccattacacaaacaagccatgcgcaactgagccagtgaaagaagaaattagagacaaaaaataaaaggcaaaaaagtaaatgaactatgtctgacagcagggtttgttggcagaagctagctagactgtccctccgcctagactgagggaagggagtgggcaggcctatagctaggccacatggtcaagatggcagggccaaacacattcctgtccagcagaggttagaaagttttgtgaataattttgttggctttttttctccacaagtgagacagaaagatgtgtgaaaccaataggatattggagtccaaggggcacaacatccaaaaagaccgctgtaggtctgagaaatgaatgcacctgtcggtattgactgtgctaaggtacaaaaccccaaaatctcattcgtggggaaacaatgaaaaatacaaaactctcagagcattctgagcagatgctgtctcgggccaacccactgtcagtcactggcatctgcacggagaagaaacagggaagtagcccagatggatggaaaagaggaactcgccatcccaggctgaatggcttgtcagagttcgaacaggagagagagagagacatttgacccagaagcaaaagatttagtgaaacaggacattcccaggtggaaggaggattctgctctgagaaaggcttagccatgatgggaagtggcaggatgctgctgtggcaggaagagttttagcatgctgggtggaggaggaaaacagacaagtgaagaagagcagaggccacacctccaactaggatcactggagaagggagggtgccaacaagcatgtacctggtttgatatgtggggctcagcttccatgagagaggtagaggggatccaaagcctataatctccagcatcccagagactaagggaggatcagatacaattggcaccggctgattttgtggttggttgagcacaaatcaggtgccagggctcccccggagcccgagagacacatggtcacccagtactgggattttcacagggccaaaaaggtgagagaccacagtcttgatacgaatcctaactcatggaagcatggacagaagtagagaatgagaagccggcttactagacatggcggtggtggttggaagaatccagggatccttagctggaaaagtgacctagttgaaggttacagggtcccggcatatctcagactaccatgggcaggaacaaatgccaggaaaaacctgcccaatcacatgcaccgatgttagcataatgttggcatttcctccaagaagactggacactgaagaaactcaacccggaacttgcttcataaatggcactgagcaatcctgcctttcacctcaactgctgcaaaggactcttcagatggtggacaagaggacagtggaaccaactttctgcatgttgctcgggccattggaaggcaagtcttcctaaagctcctaatccacaggttccatgctgtaagcagaaggcaggtgtcctaaaaacctctgacctcaacaactgtggggaactgggggtgtgactttctgtggatgtacagattaagatacatgggactaggataatataggttaattttattcggggagaaatcacatacatgagaaaccgataacccacaaattccaactccatgaatcaacacccagctgccctctatgacctgaccagaaccaagagagagcaagtctgtccaggaccccagagcaaatctcacacactcatgtacgcacctgcgaccatgcccaaatgggcatggtcagcaccacaggtacctctggtgctgtccatgcagtcaactagtaagaccttcttctctcatcattaactcaggtaaaattttatccttctcaagaactctgatgctttggacaactgtagcttttccagttgtaaacagcagccaaggctccaactgtcacaaaacagatttcaggaacaggtattttagggtttatccaggtgaagataggaaagtgtaaggtgcatgaaggtctgaggataaatgccagttatgaaggtctgagaacagaaaggtctaaaatggtaacataaggtgtatgaattcaagttatgaaggtttgaggataaacggcttaagtgatgacaaaaaagggatttgagacatccaaatgagtgaaatatgttccagatttttctctctttcattatgctactgttcatagtcttaacattagtcaacaaagttctgataagctacgaatccaactctgacagagtactaaacaccatactataccactatacaatcataactgcaagctcaaaattaaggcgcttttcattgggctaaagatatctgtcagttttaagaacattaatggtttcaaccaaatcatttctgacatgagtatactgctaatatgtctaaaatttatgttttcataaactcaaaggagtcttgcaagttccagggagctgaattgaacccacccaaacaggtcagattcaccccagataaatattattcaacctttctctggtcctgggactcccttccttcatcttggaacccccttgggaaccctccctcatcttatgatcctcaagtaccaggacctagaaaaaaattttcctaaacttaaccttgtcccctgctctgccaacatcttgccaggtcttaagaggtgccatagagttccatagagcctgaactgtgatgaaacacccagctacaccaggacatggcagcaccccagctttctcaggtcccccaaagatggccgatgcccccaggtcagcagcaagtagtcttgagaactctaaagacatccttattccctaacctgccacacctaactcctcaccttttaataataaataaaggtgggaatataaggattcaggcattattctagcctggccctgtcacttggcagaatgcactcaggcagtactctggtcagcccagggttccatgagtacttgtgtgcacaaaggtgcaaagggcccctttaaaagaaggacctccacccacttatgctctttttgctctctttcaggctcttctctctctccactctcttctctttctgctctcttcctgttctccctgctctctccttcctattgtttccctggggcagacaggacttttcctgtctctgtcttctgtcttctctctgtctctgtatctctttatctcttttctctttccttcccccttgtaataaaacttctcacttaaactctgtttgcctggcatgtttgtccctctgccttggtcaccctcacctgccattgtctcccaccaaggaccccctcgaacattatgctaacagtgatcttgaggcaagatcctacccagctaaatatccagcttgtgaaaaggatgtaaagaaaagtttagggctggtacatgcttttagttccagaactcaggaggctgaggcaggcagatttaagagttcaaggccagcctggtctacagagaaagttctagaacagccaagcttagagagtgaagcaaaccattgaaaataaagctggtgaagatgtaattgaatgaggggctatattttagccccagaaagcagtagaacttgtcagcttcagcctcatggttctggctttagaatcaacgatacaagaaagggattatggaatctccttctgcaaccaaggaatgccaccgaggtcacacatgtgtcaaaggagtcactgcatggaggcctaacctggtcattgcatgaagctatgaagctgaagcctggagtgcctccaagacccattgttggagatgccagagccatgggatacctgctgaggaaagctgctaaaagggagtagaacagtacaagtgagaaaagtgtgtgtagtcaaaaaagctgaaaagagttggagatctgaagggctgtttgacatcagacatggagatgaagagtgtaaagccaacatggagaaacaaggttccttgtctaatcagacagacagacagacagacagacacagacacagacacagacacagacacagacacagacacacacacacacacacacacacacacacacacacacacacacacaccataacttctgcattcattcactctccttgacttggggcagatgaaacatgttacagtgagatttcccttaaataattcagcaaaactataaaccccacaaggagagaggagtctgtttcttgtgaggagtaaagtatctgaacacagtagggccaaataaatattagatgagtaattgtccttttatttttccctccctccctcttttccttccttctttccttccttccttccttccttcattccttcttttcctcccccttgtcccagtgctgggaaccagacctagagactgggccatgatggactggacatgtgagaactctaccaccaagctatatcctaagcctggaataaactcattttattaatttgtttgtttcccatggtcttcatcatgacagttgttaataatcaaattcttagatcaaggtcagtacagctggacagtctagtacaacttaaaaggaatatccacatgtaaatctttattctggagtgatgttctcaaaattgaatggaaattagaaaatagaaccaggcaggttttctttccttttctttctttcttttgttttggggggtgggtgggggtgttcaagacagggtttttctctgtggctttggagcctgttctggcactgacactgtagaccaggctgaccttgaactcacatcgatctgcctgcctctgcttcctgagtgctgggattaaaggaatgtaccaccagaaagttttcttaaacaccaatatttgttctgaagtgcagagatttatttgtgtgtctggaatcataggcgttaagttttcatttgttttttaagcttcatggctctctaagatgtgaaagtcttcagtcctcagaactaccagtgtgggaaatgctaatttgcatctctgggtctctaactgggaggaagccctctttagggtttgttagcatttggagggttgtaatgaagtgctacccttcagagttctcagccataagcctttaccctcaactttctttactactagggtgttagctgtcaattaccatgaaaaatggtgaaatttatttcacactaaaagtagaattcaagctatgtggttgagctggaaatgaatctaagaatctcactggagttcagctaaatatttatttagcccagtggcttgtgtagcatttgtctatacctttgaagtctcaggctctcaggcaaatcttggaagttagctgaagtcaattgctaggatggaattatcttcctttgcctcaagtaacttttcaagagggacattgtcccttgactagacttccttgactctagtgtctgtgtagctgtgcccattgcctgagatgaattaatgtgaacagaattgacagaaaggtgctctattcactctgacacattgcctactgtcaggttgagagaccaggagccagacagactccatggagggtagacagataggtagagggtccatggttaggtaagaaacagagagaatttccaaggtggccagcatctttctcaacctcctgacttgagacaaaagtctgacaacttttgtctcaggccaacaggctccctgctgatggattggcttaacaagttcaaggctggatcaggataagttacacaacagtggtagaccaaacattctacctgtcttcaagatgatgaactctaaattagttgtttgctcacctccaataaatgcctttactgataattttgtctgtgataagaattctcgaacactgcctttgtgcttcaagatttcttgacttttaattctttaactggcagagaaaagacgaacccagtcaagaaccctagactgtatcatcatttctagactgtatcattttgggggcttgtctgggatttcttttgtagactgtatcaaggtctctgggattagacctccagcctttacctatctagtgtcaggaggcctctagtattctgaacaggaactctctgtccactcaagatagtcatattcagagcccagagtagaagcatttcagttttcatgttcgtttcttgacagtgaatgccagaacactgctcaaatgttcctagcatacttttatgttgttcatatatagacggctccattcatgattggcaggtgaggggaaacaaccttaaggctagtttgcttgctttcctgacttccctttggcattttccaatgagtcatccttggctgtaaggacacttggatttcgggcatttgtctgagccaaggaaggtgagcaagagctgggaccaggaggctattcaggggttggcaaagacactcgtataagtgcaacagtggaacaagatgtcttccaagtcagaatctggccacagtccttggggctcttcttttagtgttgagttaggttttataaggtcaaggaatgctaataacaataaaatttgatgtgctttataaaatgccttcagttatagcaaataaatgcaaccattgtgaaaaatgccctgctcataaataagagagaagtcaaataagacatgcatttcaagtgcaaaaatcatccagctccttaaaataatgaggtagatttgtttgtgcttggtagagaatgatctctaaggcctattagtaagtggaaaagtggtacgtcaaatcaacacccagtaagagctcaagagagcaatatttcccatgttattgatctttaaaaaatgatgtacatgctacccatgtaattaaaaatagagccagatgtgtgaaattgcaatatttcatattcatacagaaaaacaaaattatccttttagttgaactgtagcacctgaacctaggtggggtctgtgtacactttcagatgctgggtaccagtagtgaatacttctctgcctcacatattctcttgctctacagaggattatgactctcatcatctgtcatttcatccatcaacacataaatcccaagaagacagcaaagcttgcacagtcccaccagctgagctctggggtcattctcttgctggtgctcatcaaagatgcctgctattgcattgctaaacggctggagattcaactaagagatttgctgctttaatccatcttggcaaagaaaggttatgcccagaggctgtgataacccaaacacaaacctctgagtttatctgccatgtgaactttcataggaaggaagagtcttaaaatcaagcgatgggagctttctcttccagttgcgaagttttgccctcgattttgatgaatacaaatgatttaaaataaaatttttccttatctgttgttggggctcaaaaaaacccacacttaggattaagtacagctcagtggtacagcacctgcatagacatgcctgaggctatgccttcatgcccatcacatgaaaacccccaaaccaaaccagaataaacagacaaaagaggactctttcatcttaataatgacaaacctaacccactgggaaaaagtctgcccgagagtggttttgccagccaggaatacttcctagttcgttgcctttgtgatatgtagctcatgccatcgcccctttaagcccgacctctacaaagtgttcattgggatttcccggagcttcacattcaggattagcctgagtctagagggaaaccacctgagtggagagaggaatagtttgggtaagccttcctccctattttgcgttcttcgaagtcatgtcctcacagaaagccttcagtcaggtttgtttgggctctgagtaaatctgagtaggaactgagtcaggaaacttgacctggtctcaagatttttttgcttctcatgggtggaactatgagagcctcaccatctagctgtccattaaacactagcaagttgcctagtgtctctgtgctccagtgttttctctgtaaaaccagatccttggctttgcttcagcttggaaggtacaaagagctctgggattcaagacagctcaacagcccagaagccttcctcaaaggaaagctctcatgctccccttagttctgagccagacctggaatataaggctacaggaacgaaaaaagcaatatagctgcttctcacttcaagctcccaaagaagatggtgttaactgtgaaaaagaagagagctatgactatcctttgacagcctctctcaggacagaacattaggaaaggtgaacccatggaatacaaggtattagtcagcgtgttggttttcaggacaatgtctcattctgaaggttctagaaacataatttattgaatgaacattttcagctggggggtgagaatagcaaccatgtttgctgaatggcgaatttgaggagggacagacataaaaggtcaacatagcaaacataacacactaattaacacttccctccaaaactaacaccccctttcattcttctttcttttcatcaaaaaatgtattgcaagtggctttgaagatggaatctttcccttgaataataaaatgacttcaatatttatgtttttcataattcagcacctcagcaacgaaaagccagaaacaaccatttttgcctttctcaggagcaaggcttgtccaaggctttcttgcttcagggtgagggacggaacacgatagcctgctctatcgtcagcccgcaaatctccagcttcaaatctgcatttttctcagcctcacccaagctttccccacaacatttgaaaactttatatcagtgacagcgtcaaggtcacgtttctgctaatacctgtctctggaccacactgaaccattttgagggaaacactcttgattagccttcagttttacaacgcagtaagcatgccatgtgctaattatggccggtgacaccatgaaataaaagtgcattaccgaatgctttcaatttcttataatgatggtaaggtgacatgtcatggggccattttagcccgagacatcactccagagaattccaaacagatatagacaagtgccaccaagacccagctccttctccccccggggtatttatccacaggaataggatgtcctgaagcaacactggagtgctgataagcccacttatcagaaagataccgtatttctgtgagtgtgatgcacactgcttgcattttcttgataggctagtcatatgaaagctggcaaagaaggaaaaggagcagcggtgtggtgcaatattaacagacagctgtccctggcttcccgataagtaggatgactcgcattgctgagctgtgcgctcactgccaaaggaatggccctctcacatttcttcctgattcgcacacactgtggccagcttgtcatctcctccctcttgagcttcccagacactgagtctggaatgaaaattcacctgcctctgagttggccatcggtgggggcaggggtgatacttgacttcccaggttggaagattatctcacccagccctaactatataaccagctggtgtggagggactcggcagggccaactccaggggttcatccacgagagagcaaaacatacagactcactgctgccaacatgatggtgctgagagtagaggagctggtatgtaagacatcttcttacctgtcaatgcctgcttcatcttggcttttatttgaaagttcagatgccctttctttttcaggcataatgtaagggaagtctgcaaatgtcaagtatgggatgtggtttgtttatgtgatgaaacaagtggaaacagctgacagcaatgcattttctgcatatttcttgtttgttgtcttctcctcgggtttcattgctgtgatatgcaataatgtagttatcatgacttggggtacaaattttactgcaaaaataattgtctgagcactttacgcctcaaggctgaaatgaaaagtaagtgaatttagttggtgaatttcctaagagaaagtgggctgtgtggctaaaagtaaatttatgtgtgtcaacctgatacacatgttgtcttactcttgagagagcaagacagcacccgaaggtcatcctgggagatctgtagttatgcctctgacagtgcactgcctgaatgtgatggtcatcagggaggaagactgtgggcatcctgcagcatcttttgtggagagtgagcctaggatgagcagcactggttctgatgtcaccatcctcctcacatgtaggtaacagggaagaagaatagcagtggggccgcaggggaattcctttctggggatttcagagatggagaatatgaagctgccattgctttggagaaacaagaggatttgaagactcttccagtccaccatgtgaacccagaggagcaacaatggaaaagtgagaaacagcgagaggcagaggtaaaggccttccatagagtagtctgctagtgggaggctggggtgtggagatctcttgaataagacaggaaagagagggaaaataaacaaaccattctaaagttgtctcttcaccaaatttgaacccacaaagatgtgaagagtcagtacacatggaaatgatttgggaaatgattctgagatgagaccatgacctctggattctaaaccaatgatattatctgctgtggtcatgttttgatcaaaagacagaaagataatcataactagggaaaccccaataggacacaatgtttacttaatgtcgaggtgagatttcctctttttgataacattagttatcatggttcatagtcagaacaagtttgctatatttattgacatttacttttgttgaagttttattgacgtttatagcttactaacataataacaagtgcactagttggcagtggcctctgtttctgagtagtgggggccacttaagagagaatgcattgatatttgagaatttaatatgtattttctttcctgggtaaacatactttagtttttgagagtgagaaaacaaattctatagaaatctggagcttatggtactaattacaaaatgatcactgagagactccattgtgcctccatctaattagtcaagagttagttctacaagcaaagaaagtaaataagacttagattaaaatttgaccccagataatttaatgaaaaaaatcactgaagtgagacatttacttaaaagtgttttaaatttcctttatgagcaaaccatccacacacttcccttagacactacaggttttgtttatacaccaccagttaaaactcactatatttttaaatacctgatatctctctctctctctctctctctctctctctctctctctctctctctctcctctcctctcctctctctagctcaaaaagaaaaaattagaacaaagatcaaagcttgaaaacttggaagaccttgaaataattgttcaactgaagaaaagaaaaaaatacaagaagactaaagttccagttgtgaaggaaccagaacctgaaattattgtaaggactgttgggtttccaggactgtacatccacatgggttgcaggggtgagtgctgtggaggggagatgatggcaaagcccatgaccattcttttcttttcttcctttctcttcaatctctcccttctttgttctcttcaacgtcctcctccacttgtttaccaccttcctgttccctctctgtctccctctccctccctctctgtctccctctccctccctctctgtctccctctcctttttctctccctcccctctctcttcccccctcctcttcctctccctcctccatccttacttcctcactttagactgaacctgtggatgtgccgaggtttctgaaagctgcgctggagaacaaactgccagttgtagagaaatttctgtccgacaagaacagccccgatgtctgcgatgaggtaaggcccatgccttcctgtaggctggcaaacacagtctgagatgtcttccacttaaaaggttctccagctgttgctacatctgccaggagcataaaaatgaatgtattgttctcccctacaccacaacccccaaatactagattagcatgatggattgcatggagtttttctgttctcatataattctgtctgacttgaagacagtttgtctttaacttcttagatcctttggatagacttccaggccaaaaagtatcttctggagaaagttattattagcaatgtctttcatcagaccaagatagctcagcattggaaggggaaggtggagttcccagtccagctctgtcactacctgatgggaacagctcctgtgcattgtctttgtcgctgtttatctgtaagcacagtcttgttccattagcctgctggctcattaatacaaagccagcttgtcagcaatctcgactttgtattgcttctcccgtgaagtgatggggcagctcacaccaaagctgagtttcctctctttgaaaagtgaattgaatgatttttgatattcaatctagcatccattctggatggaagaaaaccatctgctgttttgggcatgttcaaacacaaaaagggacctttcagcattgagatggggtttgaggtttgaagtccacatccgcctgccttggcctttaacacttaggaagggtctaggacaggaagctcaggttgtagctgccagataattattctaatcctgtaatttcagtgagctctggcactctgattcataaaacaatcctggcctttctatcacttaggtcatcatagtcccagcttcatagctcttaaaggattatacgcatttttatatgcaccactatctcttgttttaatcattgacagtataaacggaccgctctccacagagcatgcctagaaggacacttggcaattgtggagaagttaatggaggctggagcccagattgaattccgtgatatggtaaatatatttctttgcttggaaatgagccaaaataagcagaccatccgaaaaaagctcaggaaaacgtacaatgaaaactggcccaattggattgaaaattgatctgagaaaactagtcaaaagctcatttctccatacaaagggaagttgggcgatgagactaggtcatggggaagcattttccagacagcctgaaaaggagaggagtgttgcagagaagagaaggaagtgaaagttgttgggcagaattcagtaacctcaccagagagtttgggtcattatcaagtcagtagcattcctggcctttcaacaccacactccttcatcagacagcacagcccactcctggcccctcggctgccagcaacccacgagaatttcctagctgcaactttatatgatggatgccaattgccactgatgagatttggagtcaggctgcatgctaaatgaatcaggtctcaggaaagtggctgctcttcagaccctaacaatcagccgctgtgatttccataaagaccactatacaatatattttataccctgaagattgaactggaaaatgcttcatttatttatatgcagctcaatttggcattatggtaaaatggaaaaggaataaaaaaaattccaaagaacctaacctgaatttaatcaaaggacaaaatactgaaaaaaaatttaagaaacttattataataaagtgatgcccaaacccaaatttggaatctggaagtccagagatgcaccaaacaaagcagagaggtggcaatctcttcaaagtacagtgcagtaaccacagtgattgacagctgaggtccctaggctgttcgagtgcaaatacagcacagagccagcagaaagacagagaaagacagggaggtgggatgaggggttagatccaggttaagatattctaaaatgtaaccagatatattaaaagcttcctaactacaaatccagccactcactcagtttagctgggctttttttttagcaagaaactcagaagtggctctcaacaccaaaaccaccaagaactatcagttgtccatattctctgggcctttaaaaccaaagaccaacccccagccccagcaagattctctttcacactgtcttgtcttgtgtttttttttgttttgttttgttttgtttttttttttttctttcccaaacagcttgaatccacagccatccactgggcatgtcgtggaggaaacctggatgtcctgaaactgttgttgaacaaaggggccaaaatcagtgcccgagacaaggtatttccttgcccttccttaggcttctgctccctgcctgcccacggaggtcctctgtcagtcgttattctatggacacctcaagccgcacacaccccatttgcacgtgccttgaggcctcggcagtctgttctcaccctttcccgttttctaatgttttagctgctcagcacagcgctgcacgtggcggtgaggactggtcactacgagtgtgcagagcatctcatcgcctgtgaggcggatctcaatgccaaggacagagtgagtagctgacagggctgagtcaccgtaagcttatttgaaatcattcaggcaagctggggcaccccagcaggacccacttcctggcttcacactgactgcatctgcttatcctgcttctaggaaggagataccccactgcacgacgctgtgaggctgaatcgctataagatgattcggctcttaatgaccttcggggcagacctcaacaccaagaactgtgtaagtagtcaaagccagggtaccactgatactttcaaattctcagatatttgaaagtattattcccatggtagtacattttgagatacactgatagttccaatgtgtctatttccgtaaggacagggtgagagttggcaaggactcaggtcacagagtcagacatagggaaactataactttggctctgaccttggatctcaatagttctttgaaagattggtcttgaataaaggatgaccaaaattgtcacctttaaaatatacattgtggggctggagagatggctcagtggttaagaacatgagctgcttttccagaggacctgagttcaattctcagcaaccacaaagtttcacaaccaactataatggatccaatgccctcttctggcttgcaggcatgcatacagacatagcattcatatacgtaaagtgcataaataaacaaatcttaaaaacataagaaccacattgggtaattccaatctgccttagtcattcctggctgaagagagcctagagcaggaatgaatgaatacacccacctttctcaaaatagctacaaattacacagagactgaaactaatcaatatccaatttggggaattccaaatattccttctttttttacaacggggtaaaatgttaccatttttccagggccaccatgcctttctgattctccactttatatgcatgtgtcttgaaataatttccctacattaggtcccaagaattcctacataagtacatgtgtacatggggaaatgtaagcaacgtaccctcatggctacaatctccagacaagtatcatctaccatagcttaaagaagatctgcaggaggaatagtgataaatcaccaaagaaatgtccttgagagttggagaatcgttacaagagaggaaaggtcttcttgaggcaaatgaccaccacctcctcttcttgtgttactgtgagcctgaagggataattaaaaaggaagcccagtgtgccccatatcccagcacatggaagaggatctcaggctcaaggctagcttgagccaccccgagtgggagcctgacttggtgacaagaagaaagaatggtgattagtggtcagatggagcctgcttggcttgagaaatgtgagcagtagggttccctgtgctaggaactgggattggtgtcacccgatagtttctctctttaaaaatgagccaaaagtacatgcaaggcaatcttcaaagacacagaagataaggatttgcctacttatttttacaagccatgaaagacgacaagcagaaatgaatggcatgcatatagtcactagggccatgtagatcacataaatgacatcagtgagtggctactagggtctgtgcgggttatttgatggtggctcttctccaatccagttcctcgaggtactgtggaatcagaagtctttcctgatttttgcttttgcaaaagtcataaattcacatagaaaatctcttgattcacctccaaccccaacctgagcaaaaccaagtctctgaatgattagcgtatcaaagctgccagtctacaacctctggaatcaagagcacttctgagctgaatacagagagtaacacttaggacttctcacatctaaagagaattaagaagtgctgtgttttaatatgtgtaaatctcttgagacacgtgcataagggaatgaaaaaatatttatttacctgtcactgacaccaatttcattttgatgagtacatttttttgagaagccttggtgaaaattctgagtagttgtgaagaacctagagagcagtcagcagcctggcagcaactggctggatatctatggcttggtggcagtgtacttaccaccaggaggcactgaataatgctcctcagagcccttcagcaaggtcctagaaatacctacatacatgctttaacttcacaatgatttgaggatctttgttactttagtgcctaaggacaggatttttttttttccaatacctgggatagttctgtgattggtagaaggagaagccaaaaaacaaaacaaaacaaacatccccaaaacaaatgaacaaaacaaaaacaaaataacaaaacaaccagaaaccccagcatgacagaatggtttgaacaaacagtagctccctcctagtaaaagcataaaagcatgtactttgataacatacctcatcaacataggcacctcccacctagaactcaaatttcctcttttctgtgtaggctgggaagacccccatggacctggtactgcactggcagaatggaaccaaagcaatattcgacagcctgaaagagaatggctacaaaacctctcgcatagctacattctaaggaaggagactatctgcaggagctgttcacaggcatttccaaagcactgcttaacagaagagcaagcagctatatccagcttttgtctgccagagggtagggagaaagacttacagacgctgcaagaaagcgctgggttataggtgtcaaactctccttcagtgttgctcactattgtatttattcctatttatttatttatttatttcctaacattgatattcaggctttcacgagcatttttggggggagtaaaacttaatctgtatgcagcattcagcgtcctcccatagatcttaaaccttgtgggtgaatggcgtctaattgcacacttttgacctgggtcgtatagaaactattcaaggtagtttgaaatgtccagggtgatcattgcagctctcttctgaattcttacggctgataactgcatgaagcaacagaaggcgtgtggtgatgggggaaagaacggaagcaattctgtgggacagacaccgaagccctccttgcacccatgggtttggtttgattggttaccaagtcacaggatgtcccaaggtggagagagttccatgagtgtaaatgcaggaggtggaggaggtggggagggagtgggcagaaatcaaaggcagaaggaaagacactgtaaatgtgtaaatgtatattgtgctgtatgtatattttatattcataataaatgcaaacaaattctagaccatgttttaagttctttgtcagtgcaacagtgggaatttctcatgtaagaagagtcgtttaggaagatgcctatttatcagtgtttaacagctttttcagattagaaatgtctagggatttgggaagatggctcagtggttaatagcccttgctggttttgcagaggacctgagttcagttcccagcacctcatgatggctcacagccgtccacaaagccggtccccgggcatccgatgctctcttcagacttccacaggcaccaggcatgcacatggtgcacgtacatgcacgaatccaaacactcatatacattaacataaaaattaaaaacaataaaaaatgaggaaggaggaggggacggaaaacaaaagaaatgacccgtagaaaccagtcttagtacttactgtgctgatgggtcacccaggtatcttgataaactgaagaattgccctcagctggtctcgggtggggcctgtgaatctgcatttcttaccacctgctgccttctccggtaggaagcagagaactacgattagagagagagacagagagacagacagagacatacagagagacagagacagagacagagacagagaagccttcattccaatggtgtggaaaaagagacccctggtgggaagaatggttactgcaggttaaacaagcacttcctgacttctcatcagggattgactaacaaattaggggcttatccgtcgttgtattgtggacaggcgctgactgggtcaaaggccttctatgagacaacattttgggtcaatggcttttgacctccaaaaggaaaagttttgttggcaaatgctgagtgaggcactaaagacctttggtgagaaaaaccgattgtcctggccccacagggacagacacctactgaagaaataagtagaaataaatagtatcagtccattttgggtccaatgaaggggaactctagagtgctctctcagtgtctaaagcgtagaggtccatatgtggtgtagaccggggttttaggacttcttggaggtgtcaagcttgagggagattctgaaggatgaattcaagcctagagttctgcaggcagcaggagagagtggagaaactcaggggtgtgggcaacctttggaactcgggacataccatgcctgaggaagactcatgtcaaaccccagcactgggctcccctgaaactcacaccaagtaggactgcatatatcaacctcttacacgcctctaccattttgtgagggagtacagtcacattctgtgaccaagatgtcttctagtccttcagctataggcgcacatggagttgtgaggatgttttgaaatgctattggcttcttctgtcttctgacaacccacaaagctcccctctcacatggagaaccaagtggcagattcattctctcagttctttcctaatcgcttgttacccttgccttccccatagcatcctgggtcacctggtcagaactctaaggcagtggttcttaaccttcccaatgcttcaaccctttaacacagttcatgttgtgctgactccaaccataaaaattattttcattgctgcttcataactgtaattctgctactgttatgaataataatgtaaacatccatgttttctgatgattatcaatgacccccatgaaagggtccagagtgatcttgacctacaggttgagaatgagtgatctaagctatgggatccagatcgtgtttctcttgctcatgttgacatttgactggtagtacttggatatgttagtctgtgaccaaagtgtcttatctgggcttctttgagcccaagagctggggggttaaaaggagaagagagttcagagtaaggttcgcattgccacattgaaacatttgtactaatgaagaaatagcaggcagaagagacagtgtagaaggaaagcatgtagatggggaccagctctgggcagtgggagagacattgaagggggaattccgtttctatcacaagactttagaagctcctgtctaccccctgaaccggctcttgtttatggtcttttgtcttatgttccctttctccctgaaggcacaatgcaacagccgatggagagttctggaagttgttcctcacttcattttcactcagccctaagtgaccaagtcttatcaatcatgctgacatcttatgagagtctgccctgccaccggtggcctccagtctaggcaaggcctgcaagatcagggttattcaatcatccctcctgcctcctggcctccaggtttgcttactactctttttaaaaaagatttatttattgacgagtatgtgtgtgtgtgtggtgtacttgttaccatgcatgtgccaaagcccacagaagccagaagaggctgtgggatcccctgcaactggagttacaagatgtttgagccactcaaagtgggtgttggggactgaacccagggtctcctggaagtgaagcagagaccctctccagccctatgctctattctgttgttttaattgcagccagaagtttcctaaaatgcagatgtgatccaattactctcctctttcaaacctttcagcggtgttccatttctccctggatcaaatgcaaactctttaaaatttggctgctgctagtctttattattttcactactggggtttaaacccagggtctcatgcacacaggcaaatgccccaagcctgagctgtaaagccccaccctatccctgcccacagttttggtttcttttgttgctttctttttgaggcaagatctccctaaattgtacaggatggccttgaactgtagtttaggcaatccttgaatttgtgaccctctccccctggtctccggagtagctgggattatagacctgtgcctccagacagcttccagggtataaggaatgtataggtttgtggagcctagtggacaaatcctaatttgcattaagtggcctggtcctatcattgtggttgtagggccctatagcagagctcctagccaagtcttcattaccatgtgccgtaggggaggcttatagcaggaatctgtgccaagggtcaagctaaagataaaccagacatctggctttgaacacatgatctgcctgcctccacctcttgtagcaaatcctactggtgtgcaccaccattatctaaactgaattttcaacagaagaaactcaaatggctgaaaaacacttaaagaaatgctcaacatccttagtcatcagggaaatgaaaatcagatctactttagatttcatcttacacccatcagaatagctaagatcaacaaaacaactggcagctcgtaccagagaggatgtggagtaagagaaaccctccatttctggtgggaatgcaaacttgcactgccactatggaaacagtgtggcaggcagttcctcaggaagatgggaattgatctacctcaaaatccagctacaccacttttgggcttatccccaaagtatgcatcatcatacttgcttaataatgttcactgctggcctattcacaatagtcaaaaattggaaacaatctagatgttcctcagcagaggaatgggtagagaaaatggtacgttcacacaagggaatattactcagctgttaaaaagaaatgaaatcagaaatttacaggttaattgggtagaactagaaaaaaaaatcatcccgaggtagcccaaacccagaaaaacaaatatgacatgtatttgcttatttttggatattagctattaaataaatgataatcaagctataatctgtagaaccacagattaggtatagagtcagggacttgggggtggtgcagataaatccgccccagaaaaggggaagagaataattatagttatggatgcgatggggtagaatgggaagatgaagtagggactggaagggaagggggggacaagggaggggtatagggcaagacagatacaattaagggccatttaaggggtagtatggaaactgaatgcagtggaagctttctgatatacatatacaaagatgacttgaatgaaatcaccaaataatgaaggagacagagccccaactggccatctcttgtcaccaaatgaagcttccaacatcaggactgagttacttctactcaagctgttggccaaaggggtcccataggaatcctcaaacagcctaggctattgccaagactacaggttgctctccacaaactgatagcaaggcctcattgctgaagacatcattgaacatgaagaagccaagatggtgcctacataaatcttttacccctacatgaaagtgtctttgatacaggaaggtactttgcatgctatcaaaggagaaaacggccacaaaccctttgttctacaatggtgtcctgcattcaggagatgctatgctaacggaggcacaaagcttgtggagtaaccaatatctgatgtgactgaagacccatgctatgaaatggaacctgctgctttggtgaccaaaaatctgagaatagatatcccaggtaccttgggtgaaaccaaatactacttttttcttttaatggcaataaaatgactcctaatgatattctgctatattaggaccattaccttgctcaaccatcatcagaagagctttctcccacagaagatggggtaaatagagacccacagccagacattatgcagagagagaccttggaagactcagccctaaacttgtttccatcaaatcccttcccttaggtttagaactcagggaggcctatggaaggggaggcagaaagagagcaggagccagagggaatagaggacaccaagaaaacaaggacctctaaacacaaccagaccagtacacatatgaaaccagagactgaagcagcatacaagggcctgcatgggtctgtcccagatggggtcctagaactaaaagaaatgaacttatgtccccatccctaacccaaaagtaatctccaattgatagccacttgcaaatgaaaaattagttccctccaagagagtttcactggggaaataaactactcttaagggtaagctacaagcctagcagtagatggccaacagaaagtgaactcaacagcatttttggaggttccttgtctcataacatcttgtcaggacttttccctcagaattttatgtatacataactttatgaactttatgtatacataaaattctgcatgcaaatgagtgggcctgtgtctttatctgtttcttgtgccttttttccatgggcccttttccttcagctgtttttatcctattccattgtattggtttttatcttatattttattattatcctttagaaacctgtttgttttccaacaagagactgaaaagggatgaaggaaggggagtgggaagaactgggactagaggggaagccataatcaggatataatatgtaagaaaaaaaagtttatttttaataaaaggaaagaaaacatttaactatactttgtgtatgggtacatgggtgctgggggagcagagggacatggtgtggaacacaaatgtataaaagacccagagactgatactggggctcaaacttaaagctgaatatcagaaaagcaaagcagctggccactagcttcttagctctacctcaggctgaatgggctgatcctgtctccacaagctctcaccaagcctctgactgtaactctccgcattgtggctggagaatgaatgcctctcgagaccttgcttcagtcttacctattttcctaatgttgggattaaaggtgtgacctataattctcttttagactgattcactcttgtgtagttctaggtggtcttggactcagaaatctgtctacctcttaaccctgagtcctaggattaaaggtgtatgccaccgttgcctgatctctacagcttgaggctgactttgctttcctgaacccttagtcaatctttaataaatcataaataccactgcaatggagtacatgtggaggttacaggttagctttctccctctaacagggggtcctggggttcaggtcaccaggactagcagcaggaccaggagccctcatttcattctttttttatggctgaataaaactctattgtatgtctggattagttttctcattgttgcaacaagtatcagatcaaagcaactgaaggaaagaaagggttatttcagcttgcagtctgaggaaagtccaccatggagaaggcatggcagtcggagcatctagtcaggaggcagaaagtgatgaatgcctgcacatgctaacttttttttttttttttttttaaataatacaactcctttttatgaaggtctaggatcccaaacccaaggaatggtgacactcacatgtagggtgaatcttctcacttcaatgaaccaatctagataattactctcaggctgttcacaggcttatctggaagttgattctagatcctgtcaagtgattatgaatgtgtatgcaccattttcttaccggctcatctgctgatggatgtctagtgggttctagtcattgtgaacagtagtcaatgaacgccggcactgaggtttgattttacagccgtcatgctttatatgcgtgtacaaactccacagagctacctatatggcattcctccactattcttgctcttttgttgtacttattaggccacattagtgtcaaatttgtgatccccctgcttcagcctccccagtgctgggattacagctgggaaccaccacgccaggtacttgtcaagggttttcattgttacacataaaatgaagagtagatattgctattggaatattctttttcctctcatctctcctattaatacggtaaagtataatgcattaaaaagaaccgatataccctaatttttaacactgagctatgctaacattcctggactggagcttcacaatcctgctgatgtgcttgctgctaagcactcttctaagcacttacagcctcacctcagaagacagctcttcttctttcccttacagttaactgcactgtcttgggggtctttacatcaataggccataaatgcagatatttacaaaaataacaacttgtacttagtctggtaaatttgctgttaaaaagaaattatttccaaagggcttttgttttctttttttggagtcaaatgctttgaactgtactgcaatgaggaaaatcactactaggtaccgagtttctaactaacaggaggaatgcactttaagcacagctcgaaggcagaaggtagtaaatgaatgagacaagtaatttcatgtgagtgtcccttctgcttctacaaggtcagcagtccttaaggaagaactttaactcaacaaataaaagtgtcccccacaatagggtttaagtctttaaaataactacattttggacagtaaaattaaaaaacaaacaaacatgtgtatcaaatagaaaagacattatttatcttcaatatcttcaaatattaaagcatcttactttggtgtacatattgttactcattactcacataaaggataaaacagttttttttttttttctttaagtatatctaaatgaatttaactgttagtattcagagaacacctcactgggttttatttgctgttttagtagtctgaatataaagctgtttttacagactgctagtttctggctttaatgaaaatatcaactcagcagaagttcccttccactgtgaccgatgagctgaaaagagggaggcagctgatggagactgaggccttctcagccctcacatttagctttcttgcaagctggaagacagtcatcatccacttctgatggccgaggtttcttcactgtagaaataatcccaaaagcagttttcctagtttctgtaaaacagaaatgacattgagtgaagagataggatctcactataaagcccaggctggccttgaatccttccacagtccaaccaactctgacctttctgccttagcctcctgagagctgggattacaggcacgcatccccatacctggtgtaagatacaatttaaggagaagtggtttaaccagcatcacccatttctttggcctacagcacgaaaataagagaaccatagagagctctgacaagtgctgatgccatttatgatcattatcttttcccaacatgcacaaagagcagtatttaacatccagtccagtcctaagtattacctcttaagttaaactgcagagcagggcttctccattgctctctccatggcatcttatgcagtcagaaccagccataggcaccggtctagcaactgctttatgtgtggtaaaaagatgaacaaatcacaggcacagatgcaggagtcacttgtactgctcccacagcaagggctgtgctgacctcatgctttggcacatgccatcgccctcagcagattaggatgtacctctcaacactgtgctgtactgaccgaccaccagtgacctggtacacaacatccacctaacaaatgcttgctgagagaacacatcaaaccaaactcagatttataattctttacacacggttaaagtggaattattttgcatgctcaggtcagtttggcagcagagctgaacttaaactgagtcaacctgccttaaaaatatgttaatggggcaggcactgtcatatacagaacatacagatccctaatggtggttttgaaatgttcaaaatgttgggataggtagactaaaaatagacataagaatgaaggcacacaggagaatcaactgcctggatgaactaatgaagcaccatgcacagtaacagtgctagaaagagcacagcaaggaaacgtgggctctgcctcccttgtgggctctgcctcccttgtgggcttcgcctcccttgtgggcctcccattttacatggagacataaatcagacacgagcagaccacgtggaagcggaaggccagaatctaaggaactgtctgaggaacacgggggactaatgggggaggtgtggggagatatgtaccaagggatcaatgtggggtaagtggggagaatatgaacaaagaggacgatgggaggtagcggacgggctatcacaaagaggactaatgggagagtgtgaacagagggactaataactgtgtgtgtatgggggttagtggtggggaatttgcatgaaagggactaatgggggtgagaaaaaggaggctacgtagaggggcatggaggggaatatgctcaaagtacatttattatagttacaaaaatggccttatgtaacttagtacaatatattcaaataagcaaaaaaaaaaaaaaaatcaaacccaaaaaatcccccaaaccccaccttggttaaaaaaaaaaaaaagtactcaaaatatatgattagtagatacctgaccctgtaaaccaaaacaagaaatgaaatattctgagttataataaaagcaaaagctgtagactgactttagagtttgatttaaaaaaaaagtttctgtttttcttaatggtttaacatacggcttttcttagttgtttttgttataaaataccccaataatagcaacttgtagagtaatgggtttcagcccacggtttaagggtagagtccatcacggcaggagctcagggagacaggacccacatcactcacaatcagggagcagacggtaatgaacctggtgctcagtttgtgtcctccatttcatccagtccaggatccccacccagggagcagtgccacccacagtgggtcttctcacacgcattaacccaatcttacgttctcatgggtaaccatagtctagatacaaccctccagggggatctgaagcgaggggctttgagatcctgtcagactaacaccactagtcccacttatgtgtctgaaactcattattttcagcagggagcaagcccattcagagagaagcaagcaagacgaatgttaaaagcctctgaaaacataggaaagggacactgtgttgttagaaagaacatattcaatgatcagtcctgcaatgcaaactatagaaagtaaagcctaaagtgaggacaaggagcagagtgtatggtcagaactggttgagaaaaggcagtcttgtaggaactctgagggaaggatattaaaagcagatatatgtcaattgtttgatagtaacctgactataacacgaccatttatatgagaacttgctcacctccatggagaaatacagctcggcaatttgtggacacggcagccttggcttcattttcagacagcccaaacagtagccctctaatagagttattaaagatttcaacccagagtcagccaaggacaatacaaacacaaatgacaatgacagctcacagggtcagtgagcccttagcccatcgaaaacctgcatctgagaagactctaagtctcgcctaactgtcattatcatgtagagtcccttgtttctctcttctgccactttatccaaaaccagaaagatgaagtttacagtctgctgtaatctgcttctgaggctactgagcagtaaacttacaactaaagggtaagaaaacatcaggctaaactctaatgccatttttgattcagttttctaagggaaaatcccagtccagtgtgatgactcagcaggtaaaggtgcctactgccaactcccatggcctgaatttgatattcaggacccaaaagatggcaggagggaactgatttctgaaagtaattttctgattgacacatgcatccatccacctaatatgaactcaagcttttaaaaagaacattgagaggatacaggtttgccacatcgtatggtcctcggatttccaaaggctaaaataaaaaaataaatgagatgttattaacattttaattatttataacaaataagataaaactatctaaaatttcatgatttaaggttattataattgtgataggtttcttaaagtataaataaatcatgtaaagtatttttaattaagtaaagggtaaaataaaaatcactttattctaattaacccacagctataaatatatataggcaacacctgatgcccaaatgaacaggatacattttatcaattactatgggcaaatgcctttaaatcacaaataggcaatacgttacactgttatttcagtttttctaaaaacgtagtgaagttttaaaactaccaagacaaagcctacactccacacttaccctctctgcagcactggatagaattacattctataaaacagaaagtaagcaacattatttttagataactgataaaaataattgaattgtataatacgaatgaccagcaattgaggctcaaataccaacttcttttaaagacaaataatgaatgtggaaatactgaagctcttcatgtcacactcaaggcagccaatacaaaaggcagagtaagcctcataaacaaatcttagtgcagataaatcaagtttaaaagctgtaactttaattcactcagagacaaataactgttatttagagaagtctttgattgaggcaaactgcaaattccttatcaaaaataaaggctttcagccatctttcccctccatatctcactcttccctggggagtttttacaaaaccctgtaggactcattgaaatgaaggaatttagtgtcttgagagttttctgcttaaggctaagaatggagttgacagcaccagcacatcactagtaaccaccagaggtaaaaagtgtccttgtctcaggaactatacctttcctctgcagatctgcatcaaattgagggcattggaaattgtgtaccttctcatcgtcgcatctcttatagcagggccatagacaagttcaaagcccagacctcggtcaattgccttcaccagaaataaagaagataaactgtaaactgtcaaagccaaacacattaagtctctccccaccttccttcctcccctctatgtacacctcctacatagcaagggaatggcttaaacagaggcggtggacccacacccctgcacccctatccaaagtgaggaagacagacaagaggctctacttgattgacagagcttctgttagctgtgggagggaaactacggaagcaggaattacagaggctgagagcagccaagtcagtgtggtgcagagggctactactccacgagggatccaaggagaaagatgtgcttcccacatacaggaaaagtgtgaaccaacagtgagctgagcaacttgaccagagaatgaaggggaaggaggagacatctgaaggggttgaggagcaggaatgggaaaccttatttatggctaagtcatttactgttgaatgacagaacaatgccatgctaaccgaatgtctgaggaactgtgctaacaaatgaggttgaggtactgcaaaagaactgtggctgggacttacacacatgtctccagcccattctgtttaagtaatactgtttaaggttcattgtagttcagaaaaaaaggtgaatgagatctgctccctcagggttttgcccagcttgccatatgggcttggtctttccatgaggaagaaagttttctcatttagtgttctcttaagagtggaaagtctgcaaagcacgggagtgggattgaaattcaccagtacacaattcagtttcccaggttaaaggatgcaatgtctgtgttggtattcaggcatctgtgctggcctgtccttggggttctgacaggatacgccctcagctgcagcatcactaagagcatcacctgtgcacattcactatgtcctcttttaaaagagtcctccccacctcccatcctctctctctccttctgcctctgcctctctttcctctcttccactgctcctgtcctcagaggctggtctcacctctcctctttttgtgatcccttaaaaaaaaaagcctttttgcttgaacattgtcacatggtgtctttctctcatgcactgcttttcttaagtttcaacagtctgtcctttcataacagatttgttttaaagcactaattacttgacaaagcggagcccttctcagagctctggtacatttgagcaaggaggttttcaatgaagagaaatgaagcaactgcacagtggatgaagagccctttcagagggaagagaacaaacaggctcagggcctggagcatggagggaaggccagaggctggagaaggaagcgcaggagtcctgtggtaagaactaaggccttagaaacttgccaaactcatgcaggttatggtggctctctgaagtaaaggcaggatagctggctcactcgggaaagatggtcttggtctccaaggtgaggctctatgggcctcactactcagggtcgccagggagtgaagggactggtctcgccgacctgaagtcatctagaagctccttctattctttcttgaacagatttctttttccatgtcccacccccaccttctttctcttcttttgtcctctgatcttacggctagcagtgtttagattttcctacatctctacgtttagctgaaatttaaacactactctcccctctttggacatctttttccccatctctaattctctggcttgcattccttctaggaatagatctagatgccacgatgttggtgctgtaattaaacaaacacctaatttccctgcctagatttatacttctcagggctggtacaactccctttctaattcaaatcatcatcatcagcagcagcagcagcagcatcagcagcaggtatattctgactgtagcttgtggagaaggggccatgtgacaatgttgttcactgtggatgatcaaggaactgggatggacttggtgaaggaaatccacagataaataaaaacatctctttggccatttcaagttatctcctcagctatttctttcgctaaagctaccagacaaagagtctgactcatatttccccacccttctagttgcagaagtaaaccacagggcagtaggctgaagacaggaataaaggatgtgagcagtgtggtgttgaatgatcagatccctaagtgtttctagttgagtcaatttaaatttttaaacctgtctgggaatcacaacaaaataaaaacccctttgagggagaggatggaggaaaacaggatagaattgccagcttaatttctttcacatatgattctagtcttggtacattaatcaggttcactttaaaattgctaagaacactcctgagaaagaaattaaagataatgtgctattgaaggctgtgaatatttctttcatataactttgctgttttagatgaataaaacacagtcattacctggtctcctgctcctaagagcattttatgtaaattgtcgtaagctcattgtatgattgttcataataatgtctttacagagaatgagcgtgcctgcctgattggcttctgttctcatgtctgaatggaagtgcctgaataggcagatgatgagatttttttcttactaaagagaaataatagtcacaatgatgtcacgaagggcagcatttgacacttagatcaggagctatggataataaaattctaagcactaaaaacttaagctaagctttggagaaggaagaagggaaaccaagagttgattccagggcaacacgctgattgcttgccttaagaatcagtgcctacgctgaacttggggtagacagccttccggtgtgtcatttgttaggatctcattgtcttctgactcactgatcaaagatacagaaggaacagcaggtcctccttgcatctgctctcactgccctaccccactgctgtaattgctttcatttatttcttatgtttcctctagcttcttcacacagatgtaagcgaacatgaatacacaccatagtttccttcttcttacctaaaaggtgtcttgttaagttcttatcttgactgatttggaagttttcccatgtcagcttgtaaatttcattttcttttacagctgcttagcatttactgtagaggtacaatgtttagtaagcctttactaatagatgtgggctgcttcaaattatccgaaagataaaaactagaatagaacagctgggtactgtgagcttaactgtacccccacctgtaaaagatgttacattcctgacctgtagaatttcagatctcagactgtaaccttttttggagatagtctgtacaggtgtaatcaagatgagtaggtcatactgaaaacagcaggctcctaatctcattggtgttcttataaaatggccagagactcataggaaaacacagtgccgacaaagagaatggtgttactgtggcagctaggcaccagttgctaataaatcaccaccagtttggaagactcaaagaaaggctcccttaataatttttagagggagtacagcctgctcacaccttgatttcagacttgtggccatgttgtatttggaatgtgtaaatgtctctcgtaagtcagtatatttaacacttggtccccagatggtggcgctgttctgggaggtagaactctgctagaggaagtgggtcactgaggttttgtagactaccttgctttgtgtcctgcatctcccttgctttgtgtcctgcatctccatggaagatcctgcggctgcatgctgtcaccatgtagctgcctgctgccttgctttcccaaccatgacgggctgtatttccacaaactgtgagcagacacaaatcctttctccattacattacttttgttacatttcagcattgaaaataacaaacgtcaagggaagaagaaatgtcttttggggtatgcaactgggaagaatgtgaggaacttgtcttgtcctttcttcttctcaatttcctggccatcatgaagtgagagttgttgttttattaaattttaaatgtgtgtatggtggacatgcaccacagcctttaccatgatgtacttactgtacctctacagtgcagttttccccaaacaaaaatatggctatctgtttctagttttctctctttcatgaaagtaagtgaataaattaacctgcttcctggtcagctcacactgcagtctcctataccagatgaagactaaatgtaatcttatgcagcctttctgtccacacctccatctagcttttattaaacaacatatgtaaaatgttcatactggattttttttataaagtagacactgtgttaaatattgcatatcccacttgtcaatgttttttacttttcagaatgtctaatgtgaaaaatgtgggaatcatgtcagaaatatcagacactctcaacagcaacttttctgcacttccagacgtaattggcaggtgttagtgtcctggtgcctgcctcgagggccactctcctaatgctaccctagtacccattgcccttatgcaacattgacatcgacctaatgtctaaaagcaagcatcttggccagactccccaaaatgctgactgctaatttaaattagatacactgattcaacagcatatttcaggaaggtctcacaggccagcactggggtatcgagaaaagccttcgcacagctggagtactatggaagctcagaggctgctttcatggcaaggcttcctcagaagagactgaagtataaaccctcactaggaatctgaccactgccatgtgccacgaggaattatatggtgtacattgctcctttccatattttgtccacatatcactatttcctcccagccaaggacacagaactctgcataaggttactcaggcaaattgcctagaaaatgggcttcctagtttattaaggtgaaaatgttgttaattttaacaaaaaatatacacagtggctgtgctgtctaattctaggtagctattttgtgggacacgcagtctgagactggtaaaaggtagagatagatttgtaaggcagagattgccttttcaacacaaaaggccaacaggatgaccataaatgtaggtcctttgtacctaatagtatctaggtaccaagcgcttgggagctgttcccctgtgtggaccacacaggtcctacctgacaggtacaaccagacctgtctgaagcctgtgactgaagccagataacttgacagatttcattcctcatttttgataaatgatctgctgaataacatagatccccaagtctaagggtgacgcttgcctggggtttagaacgttcatgtcttcatttagaagtgctaccatcatcacagttggggttcaggttctgtagctagctcttccgtattctccttacacatttggcacttaaaaaaaccaccttagtagtactcgcctagggttagaacataagtcatcttatatcttccacattaaacagcttacattaccctcactgttgcccctaacacccagctcaagcagaaattctttaggagaaaagggagacaaaagcaaggaaaaaaataattctacaaagacttcagaataagacgattgtctactttgaaaacggtatttgaattctgacataattcagaatgggatttggaatgtttgctaaacctttccttgggtaatagtttttgataacataactgggttctggaagtcactatgctaaacaatatttctatgttctggctatcaaagcaaatagttaccagctgcagtgacctcataacttctgtatcagttactggtgtgaagtaatactacctttctttaatggaaacagggggtggagtgggggcgggctggggtgtgagccttagaaggcaatatggcggatagaagatgaaaggtataggaaaaagagaaatttatatgagaaaaagtctatatccagagggaaaataaaaggatccctgcgcataggctaccctattgcagtggttcttatgggagctagcaggccacagcatatacggtgacttcactcaccatggaagctagcaggtcaccgtgcacagtgacttcacttaccagtccctggtgacttcacaccatttccttttgtatctcgatttttatgaatttcaaggactctgtcttttttaccttctcgtttccttgcttttttgcttgttttgattttttgagacatggtttctgtgtagtccttgttatcttggaactcactctgtagaccaggttggcctcaaactcacagagatccacctgcttcctgagtgctgggattaaaggcgtgcaccactaccgccactaccacctggccttttttttttttttttttttttaactttttccatcttaatgtaatgttgaggttttaaatatctatcattgttaaatatcaagctggaaatattcttcataaattttaattcctaggcctttcaaaaacagtaccctgatagttaaccaaatcctttttaaatttattattattgggcaggggcggtctcaagtgtgttgctgttggtcttgaacttctgggtcaagtgcctattagagtagcctggagtaccaacacaatcagcttaaatattttctttgtgtgtgtgtgagagagagagcgagagagagcgtgtgtgcacgcgcgcgcgcgcgcgcgcgcgcgcgcacacacacacacacacacacatacacacacacacagtgtgtggaagccaggggcagacatcagatgtcaggcctcatacttgaacccagagcaggctgattcagtgtgtctagctaccagattgctcctgtctcagttcccttatgccgagactacaagcctgttgtcatgctgcctggttttaagtgtggatgctggagatccaacctcctagcctcatgcttgcacagtgaacactttatccactgagccaccccacagctcccagcttagacactttctattgtaaactttctcttttagtcagcttagaaaaccaaaattctcttttctgaatctgctctaattactaagtacccaggccccaagaacacaggtttcttctgcttcttttctagtctgcagacagtgtctacagattcaagtttatagcagaaagaaatgcacttaccacattaatagggggtcttttgaagtaaaatggtaatttctctgttacagttatacagactaaatccacatctaagtgtgtgcaagcaacctgtcaagaagaaaaatagattaacagaaaattggcatgcacaggaatgagagacatggctatactttatatacaaaaacataaacagtatggcttactccacaggtatcatgatggttctgtgttgaattgtaacaaacctattacaaagccagtgtctgctattctttcaggccagcctgaaggcccgctaactcatgaagtttgtatctatgaatgagctgctgaattggggtcagtatctagagcattacttttagttatttcagaaagcagaaggtaactgttgtgaaatccaaggactggaaagccataatgagtgcatgccagtccatcttttacacaagctatttaccgagcacatttccaccaggaattgttcaggctgtagttccaagtggactactgtggctgcgaaatagcatggtgtgggtgatggccttttgctcatatcctaatagaaacagtttagcaaagggttacagcagagctgagaggattctctgtactcatctctaagagagttttgaaaatatctgtataaaccacatacaaaagaaatgaaacagataaggcaaacaggataaatagaaaagttagggaggaaagcaaattggtgcacagattatggagtgcaagtcaaaagatactgaggggacaggcctagacagcaatcattcagacattacttgatttcgaggcaaaaacactggctgttttgtactatgttgaaaatattccactggggctgaagagatggcttggcagttaagagcatttatttgttactttttcaggggtcctgggttcagatcccaaacccacatgatggttcacaaccatccgtaattccagtttaaggggattggacaccctgttgtgctttctgtgggcatcaggcaaacatgtgatacatatacatacatgcacatacatgcaggcaaatactaatacacattaaaaaaaaaaaacaacaacaaaaaaccccacccctgcttagaatactgatgcatatgggcttcaagagcaaacctgataagccagtgtctgtagcaagaacaggggaaagcacggtgtgaggagcaagggaaagaaagtattggtaatgcctgtaggaagggcagttcttcagcagtgacagatgtcacatctcacccattgtcctcagaatgccagcttctgtcattcttgtcccagccccatggcttagtggtcatcagagaccatctggtttgaagatggtcatagttacatggtaagagttacatggtaagagcctgggagactatgttgtttggcaggaatatctggctcctaaagaatctgcccatcccaactgctccagctgtctggctcacaaagaacaacagagactttgctaaaaatgaatcgaggttctgcagaggttcagagctgagctgactccagcatctgttcatcttcaggagcacagcgaagagcacgatggcaagagccaccaacattttacttcctccactgagccacagccctagtaaatattaacaattcacgttcggacaagcactatcacttatagaaatatattttactgggactttattatattatatagctataaattccacacaagccaagacaatagtgcaagaacagtcactgccagaccatcacaaagagaggacagaataaaaaactttccatttcacttaagtaattatgatccccttggtctcttataggatggaatgtgccaatgttttaaaggatgaggtacatttagttatagaactcacatattataaggcacaaaaagtatggtgacagtgaagacagagggataaacagtggacaatgagtcaaagaagtaggtaaatatttctgaaaaataacaaaagaatgcctgtggtggttgcttctagagttaacaagaaaggagttttagtgggggacggcatttctgaggagatgcacaagaaagtattggcttcctctggagaaattttagctgggaaagcatgctttttatacatagacttaagtggtgttggaatttattatcatgaacataattaggtttaatgaaaagaagactttaaatgacttccctactaaaggtgaattgggctccttctcatcatacatttttttgtttcttcctctctcctatgggggaggcagttaaacaagcgatctgcactggttgaaggacgggcattgtaaagacctttcagcaacagaggagacctcttaaatttaagatgttccaaagtactctgtgacttaactttctatcaatctaaacgtccaactggttcattcaaagaactatgtgaagaaggggcacatgcccttattcctagcactggggaggcttaatctaacattccccaaagcattaaaatgacagaattatgtctaaaatagttttggagctaagtatctcaattctggctgaaaattggtagactgtatctgaatttaactttttttttttcttggagggacagagacatctatgatggtttaaaagtttgtccccacaaaaatgtacaaacatatgttgatttttgctgttgtggaacgcaaggcacaagagagtatggctcagccaacctttcacgctggatgtcttttattggtgccaccacttatcatacacataagtcaggcttgccaaggcagagagatgcccataagcagtagctctcaactgtacacgtgcacaaaattcacctaaaaactatcaaatggctggctagcctatatttccagattcattcagtaaataagacctaatgatctgtaacttaataataatcccagataaatctgaagctgaaagacttagactgtttcttgagagatgctgccttcagagatgtccccttcgtgcagacattctacaacagcatcctgcacaggcaaggcttgaaagatggcaggaacaggaccaaaccagaactttataaagctacttccctgtcaggtgtggtggctgtccttgaactcacaatgtaaacaagctggcctcaaatacagagctccatctgcctcagcctctgaagtgctggtgatggagtgcaggcagtaaaggcctgcaccaccatacctggtccacaggtctttgatgattaagtacttgcttctactcattcctaatctataacaaaatacttgagaattaatataatcttttatttcataaaagaagccaccaaaaatgggtggtgtggtgaggtgtgtgtgtgttcacgcacaggcatcctggacaatctgtggtgtggtgtttctctctactaacttaattagcagttgctgctaaaccctgagacactgcatcagcctccgtagtcaatggctccctctactggataaacttagggtaaaaaaaagatccgtctacagctttagaataaattttgcttgaaaaacagtcagccctgaaaacatacatacaagtaacatttagatggactcaacgggttatattcagaaatatataatgcatatgtatatggactcaatgggttacatttagaaatatatatgtatatacaaatacgtatattcattcgatagaaatgaagaaatatcataaatttgaaagagcatagggaggggtatatgggagggtttggagggagaaaaggaaagagaacaatctaattaaattacaatctaaaaagaaaaatactaccttaaaaaaagggtgtaaaattaaaaaaatgtacgactagtattttttcctgcaatattgttttggcagatggatcctttttgagattagtttaggagaacattcataactacatctaaaattaattatacctcattttcctgagcattccttataaagacattacttaaaagagtatttcagtttttttcccccactgtaatcatttgcaagaacagggcagtctatcatagagacaaaaatgagtccatgtgctaagttccttcttgtctgaaaaatcaacaggtcaattctaaaagaacaaaaggaattcaattcacaaaggctctcaaaaattgattctgaggagtttctggaaaactaagggatgacccttacactggcatatgggttacacctcagagcttgcagagggagctggaccagagacaggcttgcctttttcttctctcacaggcagaagtagataaggccagaaactgaagtggttactgagtggacatgggtgaatttaccaaggagaaattttaactgaacaaagcatagagaaaggaacaggagaaaattcatgagctctttcacaccaatccatcaaatgtctaccaggatgactaaatccaaaccagcatgccactcatatatgcccctatgaaatcccagaactctgagtgcaaacagaaaaagctaatagtttccaggtgggacttgtaatggttagctttaattgtaaacactacacaaactagaatcacccggtgttgtgggatattttgatggcactccgccatcccgactgcaattaagtttgaatcagaatgccaagctagctaccagttgatgaaaattagccatagaggttttggaggaccgaggacatgtaaagagacacaggaagtagtagggcagggcttagaaggattcttggcccctttggatctaggaaggagagagagaggggaatcactgctcaagtctctgtcaattctctgttcattcaggtttttacctgatatctgactcccgagtttttattgataaataattagaaaaactctttaacttgggaagacagtctcactgagggaccatctgcattgagttggccatggattgtgtctatgagcaattatcttaattaagacaatcaatgtggggaagacccagcccactgtgagcagaaccatttcccaggcagggggtgggggtggtgatggtggtcttgaactgttgcacacaaaaccaagtgcacacacatgcatacctctctgctctgttatcagcagctgcttgaaattcttgctttggcttttccagaatgatgggcagtaactaatcctttctcccttgtggctttttgtccacttatttgaatcacagcaacataaatgaaactagaactaagaggaatagggcatctactatgtcataacaatagacttacataatgggaaaacagtatcctttttcacctgtcacttacatgaaaaagtttttctgtttttggaaacactgcaacaatatcatacagccggacccttgaagaagttgctctctgtaagacaaaatgaatgttatcacacagtagcaaaatatataaacagatgcctggtcacctagcaacattcaacatccttaaacttaaaccagtcctccttccttagcctcctgagtgctggggtctgagttaccacatctggctgcaagtccctgtgttcacaacactcactcaacaaaggagaacatatacttaaaagccactatcatggccttttagggaacaaagatcccttttaatccagatttgaaaccattcagagaagacagagaaatattaagctacattttttaaatagaactaagagtaaattccaagacagctttatattatgcaaagttattaatttatgtatgaatgggtgaacttttccccccataaatatgactaagttctagaaagggcttatagccttatgtgtatgggaaaaggaaacatggagacagccgattccctggtttcttggagtcagaaagaatataacttatttttttattttactgagcccacagttaagagactttgagttttgggagttttacagagaatctggatattttagagaagcttggactttgagaaagactttggatatttttaaaaatttatttatttttttaatgagcactctgcatgtatacctttatgccagaagaaggcatcagatcctattatagatggttgtgagccactatgtggttgctgggaattgaattcagacctctggaataacagctagtgctcttaatccctgagtcatctctccaacctgtttttttttttttttttttttttttttttttttttttttttttttttttcttaaattgataaagggtttctctgtgtatccttggctgttctggaacttgctctgtagaccaggctgtgtttgaactccgagatcctgagagcatgtgccactattgcctggtgagcgtgaactttttttttttgagaaagggtttctctgtatagccctggctgtcttggaactcacagacatcacctgcccctgcctccctagtggtgggattaaaggtgtacagcaccattgcctggagaggctgaacttttaaaatgtttgaatttttaagactgtgggacttctaaaaattagaatattttatattatacactattacatatatgagattctggggatgagcaagaaaggaaaagttatggtttaacagtgacgtatttgtgtgtgaagctgacaagaggtcaactgtgctggctaatttcatgtcaacttgacagctagaggcatttggggaagagggatcttcaattgagaaaatgccctcatcagattgccctgtgggcaagcctgtggtgcattttcttgaatgatgatggatgtgggaaggccagctaattatgggcaatgccactcttaggatggtggtcctgggtactataagaaagcagactgggcagactatgagcagtaagccagtaagcagtgtttcttgtggcctctgcaacagttcttccctcccggtttctacctcaagttcctgccctgacttccttgaatgaaatgatgaaccgtaagctgaaatcaacactttcctgcccacactgcctttggtcatggtgttttatcacagccctcagtggaattagcattttttcctagatatagctaaagtacttcatgtgttgtgggtaattcacatgactgtgacacacaagctcacaatgaaaattctgaacaataaaattaaaatgccagatgtataagaaaatacttctgttctaggaaaggagaatatatcagtaaaacacagttactgcttaacagggaaaacctcaaacttgatactgtatatgagaatgaaaaagtacattcaaaatgtataatctgtgaatgctggaataactgatgacatttctcctctgttgctggcaccttctaactttttgtaagagacacattatattgtgcggcttctacacacagggaaagcaggaaggtgtcatgggtttgagggttacaggtggtggaagaacagggtgagatgacaggtgacaatgttagttaatatagtttagaagccaaatgtagaaaaacaacaaactcaccaaaacgttacagtgagacggatctgtaactataattgtcaatctagttaaaattttaatcggtcttgattttccctataaacaaaaatacattattaaaaaagataaaatgcaattgatttgtttctttttttaaccagtacaaaatagtaaaatttacagaggacggtacagatcaacaaagcatgcttgttctacaggaatatatattagcagaagagaatactacgcacatctagtaaactacacaatgagataatttaatagctgtgggactttaggaaggataccaaaaagttcggatggacagtaaaaactgatgaagagacgagccctgatgggaaggtgaaactggcagaaagcagagaacaccacaggaaggcgagatgtttgaattaaatgggcagacactacacttaaacactaaaacgcctacctgtacaattggtaaagttgtgaagagttcagaaactgctactggcttttcaatttcctacaacaaatgataaacagcaatcctagttacatgttaaagaactaagcactacaaaacactttaagggcatctcagaaaaaaaaaatcaaaaaaagctaatttctggtattcaaatgtactaaacagcctttttctttcttaaggaaagaaactaaagagcagagaagatgctcagaacaccagaggataaaaataagaacaatttttaaagacagaaatgacctataaggtacagttgtttaattaaaaataagtatgcatacatatgtatttgatagtctattaaaggtgtggtggtggcacacacctttaatcccagcactcgggagacagaggcaggcggatctctatgagtttgagaccagcctggtctacaagatctagttccaggacagcctccaaagccacagagaaaccctgtctcggaaaaataaataaataaataaataaataaataaatgggaaaaaaatcagtaaatgagttaataagaccatggtaacaagatatcgtggttatagctcatttaacagcaatgtaattttaaacatctttgaatttgtatgatatatattagttcagttattactgtaaaagagtaagcatagggtgtttttaaagaagtatagttgagggttggggatgcagcccagtgagtagagagggtggagacacagtgttgcaaggtatttgattacattgtgtaaagatatgtcactgtgttttaataaatattaaatgaccaacagctatgtagaaggtataggtgggacttctggacagagagaactctgggaagaagggggagtcacagctggactcagaagaagcatgacgtgtaggaggagaggtaaaaaccataaactacatggcagcacgatgattaacagaaatgggttaagtcataagagctagttagaaacaaccctcagctaaggccaagttttcataataagaagtctcactatttgggagctagcagtacagagaagacttgccacatggcagctcagtaagtagaggtagagtgatttctaaaatgcacaccaccttgccttctacccctgcatctcataaactgggcatgggcttgtaatcttagcaggaggtcttcgttggcaacacagttgaattccaggccagattgggacacataagattctgtctcaaaacgcaaacatgcttgtgatgacttatgcttcactaccaattttactggacttagaaatgatgatggaaacacacctctgtatttctataatggtgtttccataaagggttaacccaggagggaagacccaccctgaatgcaaactgagctatttcatgggttggagttctaagggaactaactaaaaaggagaaagtgagctgagccccagcattcatctcctgcttcctgaccgaggaggaactgtgactagccacttcatgctcctgctgccataccttcaaagtataagaaaataaactcctccttccttgtgttgtttttgttaagtatgtggtcattgcaacaagtccacatttctagttccttattcccaacacaaatacaaatatttgtaaatgttgtttttgatatttttttctgggatagggtttctctgtgtagctttgtagaccagactggccttgaactcagagatctgcctgcctctgcctctggagtgctgggattaaaggcgtgtgccaccactgctgggcttgtaaagtcttaatatttatttactaattaatcagagaaatcttattttacctgtttcttttccttaaagtcaacaatatgattgatggcaacaactgaatatccaactgaaaaaaaaatagattatttaaaaaatattctttcttgttcaagagtatgagatgaggttagggatgtagctaagtgttagaatgcttgcttagcatacacaaagccctggattctgtttctagacttggaaagtaagagggtttaataatatttactgttatgtttcaggttgttcatctgtcaagtgatgttaacagcagacagcacttcagagtgtcatgaaaattaagcattttagaagagtgccaggcacatatttaggctgtgatttatgctagcaaaacactaaaaacaccttgtttctgctttccaaacaatattctcaggatttcctgcccctttgttcatttttattccatcaagtttatgtgtctttccgtcaccttcattatcattcatttcttctgcgatgctctatttcctcccttacccgaaggtgcaatggaaggacgaatcccttacacctcttttgaggtgctctacagtaaaagacagggaaaacgacggtttgccttatcctcacaacagttagcactgcttggaaaagtgcctctgtcgccaacacatctaaatcacgactcttgtctttaagttgtctaaagaccaacaagatgatagagtattaatataaaagatagtgcatggtaatggcaaactagtctaataactcccgagttcaagctattagagcatccattatttgacagaccctatggcaggcgacagcacacatgattaatgctcatccccaaggaacttaaaactcgggagaaataaggtaacaccctccccattctctaagagtccacagcagttcctgcctgcgacccagctttctgtatttgtcagatgtcgtcggggcccaaaaggactgacgttaaaagcacccaccggcttaggggactgtacacctggagtccagtcccagagcctaccattcatcagctcacagcccccttgccaacacctcgacccctttggcctctgttctctccctccgcacggaaagactgtgcaagcccaggcaacggcagcttcctcagtagcctgtgagtttcacacgccagggatccgggagacatagcaactaccatttgcctctagggaaatgccgcaatcccacgagagacccaataatagggcctggaaaaactaccaagcaaaccggtggtatgggggcagcgaggggccgggctcgcggggcgaagccagtagactcacggtgagcagcggtctccaccagtccccgaagagccttcaagtccgagcccgctcttaggtccaaatctgcgaacgccgccatgctgacgtcccaggagcacccgcgcgccaatctgcgcagtcgccctgttattcctcgagcatgctgggagttgtaggctgtcactttggcatcctgggatttgtggtttttcccttctcagtcgtctactctctgcacagtatttcctgtcctctagaaaccagccaaagttagtgtgctcgaacctacagcctcacttactccctttttgtcgtgatttgaacgagaatgtttggtagacacagtagggtctttccccccgcccctctcgccaatacaacagagtagaaagtgattcattctaaacacacccatagagcattttgagatcaagcagacgtctaaggtcgtgaagccctgttccaagagctgggtgagcctggggtggtggcccacgccttcagttccagcaattggagggctgaggcaactctatgagtttgaggccatcctgatctacacggtgacatccaggccagagagggatacataagtctccaaagtaggtaagttgataagcacatgaagagacatgggaaaatgtttttctttcctttctctaatgtccattccattctttgaaaatgggcttaaaagcctctttgaagcgcttgctctggggcggattgttttagttctttgggctaagcctaagataatgggtctctgttatagaaacatctacaaccacaagatggcagggcactctcaaagatgaaagcttagcgacaatacacaaattttcatgagacatattgcaatatcatttgatgtttctactttaaaaattaacttttgaatattggcagatcaattatccgacggcataaaatgctggcattctttttaatccacttgatgcagaagggcagttctttactcctttccattctgtctctggctggctagcatgggaatcctttatgcattaccaataagctgccccagcctcctgcagctcagtaatatgatatctgaactgctgggttctcaaataagaaaagtctatcgatcagtaggacttgaccattaggacaataacgaagtgctgaaaaggtttagaaacatttcaatttctgtactgattgcaaacagtatgaggacttcccctctgatcacactttgagtaatactcttcaacataatggtctctaatttcttactgatttttgagagaatatttattattattattattgttattttgaaacaggttattgttagtagcccagggtgggctcaaattcacaatcttcttgtctcagaatcccgagcgttgggatcacagctgtgctttgccacacctagctttggttaatttacataaagaaaaaaattgttgttttgtttggtatttcccccaaacaaaacaacagcaaaacaacttctgccactagagcaaagtcatacaaaacaaaccactggcttttcaacagaatgtctagtgctggcttttgtacaagtagaaaggcatcttcatacatgatcgcaaaatctggattggtcagtagtatggccatagtgtagtggacctaagttaagattaagaattttgattatttgatgctgagattaggttgaagaggacatatttgttttaaagtcgtggtgatgttgctgtggacttcaccatttagaatccctttgctctataccctgagctttgttgaagaggaagagaaagggtgagaaataaaatgaacggatgaaaataattgagcactatactggggcagaccatttgcaagtacttatgtgtgtgtgtcttattaattttcaaagcaattagtattgttttttcttaaatcaacatctatttcttttgacatttgagcaaccaaagaattaggcaattatataatggcgggttgaagcatttggctcagttgctgcgcagtgtattgtctcctgagataagcaagcagagaggacagttgtggatggcaggtaaaggagagaaaatgaagagaaataaagggtcaaggaaggtgagaggaagcaggggatgggaaggaaggaaaaggaggcagaggaggaggcaggagtgcgaagagggaaaaggatggtatagagaaatgatacggaataaaaggtcgaatattggcctgaatgggtggcagaggctgcaaggatgcaaagtttgaagaaaacattagaaattcttaaatggaacaggacctgttgcttgctggtttaattctcaaaagaagtccacagggtggtggtggtggtgtggtaatggtgatggtggtggtggtagtttctgttatcctggactttaggaaaatggttctaaataattttctcttccataatggaatttagcatcaggtctaaaagaaactgggaaaaaatggctaaccgtggtgcctaatagcataccaaagtgcatgctggcctccagactgtttcagcatctcaagtaccagttacagagtccatgctggcatcctggctcctctcagctcttctcaccctgccgtctaccctaaacttgtctagctcatgagcttacctgtcatagtgaagaatatgttcaaaatttgaacgctattgtccttagagaatccatgagaaagttgtttcagcttgtcagcggctagtgtgtgaaacagaccatcaaggcacttgctcaagatagataactttcgtgagtggaagagtcaagctgatcttaagaaactgtctatccttgtaaattttactgccgctattgttcttgcaagacaatgggtcctgggactaatcgataattttgcttctgtataaactgcttgctggagataacctaggctgctacaagatgtctattgtaaaaattagtcaccataggatgtgagagaattcggccccccaaaagctgtaactttgtggtttctccctttataagcccagggccagtatgaatagctgctgcatcttgagaaacctgaatctgagtatttaataaagcctcttatttgttaaaattgattcatggtcatggtgaatctctgagtaaccctgaactcacaacatcctccccgaagcttctcattcctatataaccctgactttttggccatatgctctctgctcctttttgacccctctttcttggcactctctcctctctttctctccacaccccatcccccttctcctctcatggtctggttcagtttgccagacatatttaatctactactttctattcctgctctggattcttccagatgcctcggactgtactctcccccttttggggttctgagtttcatcaatagaataattgaagaatacacataagcaggctggaggacaaggaatggactcgagcagaaactcggcaatttattaggatttaaaaggagaactccagggcagccaagctgtgactacatcacagctgcctgcaaggaagaggagaatagaaagagcaaaggcaacactgcctggagtaaagcagcaagcaggcaggccgggaaggccagcttcagagcaaaagctaggaggcacactgcacaggctagacagtttaaaggctctaaccagcatagaggtggttactgcattgggagttaggcctcagaaaggtgggtagatccagccgcacctcatgaaggctcaaccagtagacactgccttagtgggtggaaattttggccaggaaaagcacattaaatggaaaacctgccttcctagggatggttccctgatctggcaagtttgattggccacccagcggccggccctgttctttaccgggcttcttgtgcttttcttctggggcctcatgacttccttcccatctttctatcctggtgtagtctcagtttaaacgtgaaagccagtgttgttcgaagacaggtgggctcaggatgcaggaagggccagaatttcaatttgagttcacagacaggaaaacaaacaaacaaacaaaaaaactcgtgtcccggctcatggtagccaggctggaattctctacaagcgggagggagctcaatgtgcacaggattcactttcaacagcctgtataaaaccagacctcaaggagagcagtcgcttgactcagtctacttactaaaaatgcaaaccccgtggagaagcacacacaaagcctaaactagaatgataccctccccatccacaggtcagtccagctgaccaaaccaaagcaaaactgaaccaaaccagcaaggcactgctgctccacgccatgtgcaaacggttgctcagacaaccctttttactttgggcacattaacatgggggcatttattaaggctagagaagagagcagatcctaagcaaactagcatttgtaagtgtaatacttagaagtcctattgcctaatgtattgtggtaaggcttagaactgaaaggacaagtcccattaaaaacaaaacaaaataacagcaaaaccccaaagaaacccaatttacttctggcatttttcattgcagctgacaagtgaatagatgccccaaatctacttgtgtttctgagaattttacttgtttgaattatgtataaacatgtgcatttgtgcaagtatgtgcctttgcctgaggaggccagaggtatcagatcccctggacctgcagttatagctattttgagccacacaacatgggttctttgaatccaacttatgtcctctgtaagagcagtaagggctcttaactgctgagacatctctctctagtccatgttgtgagaatttcgacaagactaaaaatcctctagaaatggcactcctcagaggtactatcttagaagtagcttatttttgtgtagggagatgaattttgagaatttgaaagtagactccttagaactggtaaccatgacaacagatggacttcctgcaggggtcagtattcactttagacttatgaaacacaagcacaatgtgacatggtttcatcaaagcacaaaatttaagccaatttattgtaccattgaccaaagaccactttgggctctaaatttaaaaaacatatacaaatgatagctaaagcattaatcataaccctcacatagttcatgcttcaaataactatggtgaatattgatagatgtttgaactatcaaaaggcatttacttgcaaatgtctccaagctccatcttaggtagggtattagtgaagagtgaactggattctttcggttgatggcactatggtccctttaaaaactccgaagtactttaccttccaaggaaacatataaactatcagtatagcaaaatgatatctttgggaaactcattagactagcagtaatccagcccattttctaaaaattacaactcatttctacttatgaaaattaaggactcacttcctagtgcaacacaaaaccgtggagatgatactggtagatatggaggtttgctgggtacttgcccggagtgctagtatctgagaacaggaatcgagcagatactgagttacataagaagcagagacaggatagtaaggaaagattcatgtccatgggaggagcaaagaggaaggtcaggaactcaaacagcaactgtgcacagaatcaggacttttatggctcatactctgtgctttaagggacatttgcatagtagggactttctggcatatgctctgtctgtcacacatagctctaaatatggcttcatgcatcgcatgtttcattagcttcttaagtcttcacccaggggtatacaatgctggtattataatgagtcatacatcacctttagacgatgccattgttcacaaagtctatccaaaagtataagaattatatcatcttcactatgataatataggctaacactactatggtactaatgccagaaaaatccctcaaaatagaaaataatgaagagcaatatctcctatgaatatagatgcgatagtactcaacaatgccataaaacttaaatgcaacagcatgttaaaagttttatacaaccgtgtccaagtggcatttacctcaagagggaaaggatggctcaacaatgaaaatcaatgaatgtagtatttcacaccaacagaaatcagcaacaaaatcacatgactatttcagtgccctttcagggtatcccttctcattcttttttgtaatcaaaattttcactatttgaggaatttttattaaaaaaagaattttctgacccaattccatttccttgcccagttatgtgtaacagaactgacatccaagctatcccacagtaaagaattacaaaattaaagacaggaacactttgcctttttgtactgtgctgaaagcccccctaaaatattaatttgtttttatattttacttttgtgtgtgtgtgtgtgtgtgtgtgtgtgtgtttctgtcttaaaatcatataatctagaactagtgttttttggtagataaggttcagttttctttctgtttaaaatttaaactaaaaacaactttattttacatatcaatcccagtttcccctccctcctgtactcccgttccccccaccatctccccatcccacctccacccccatccacgcctcaggaaggatgaggactcccttgggggatcatcaaagtctgtcacatcatttggggcaggactgaggccctcccgactgtgtctaggctgagaaagtatccctccacagggaatgggctcaaaaagcccattcacgcactaggataaatactggtttcactgccagcagccccacagactgcccaagcccctcaactgatacccactttcagggggcctggttcagtcttatgcagattccttagctgtcaatctggagcccatgggctcccacttgctcaggtcagctgtttctgtgggtttccccaacaagacaaaatggcggcctacagaatgggaaaagatattcaccaaccccacatgtgacagagggctgatctctaaaatatacaaagaattcaagaagctagtcaccaaaacaccaaataactcaattaaaaatggggtacagatctacatagagaattctcaacagaggaatctcaaatgactgaaaagcacttaagttattgctcaacatccttagccatcagggaaatgcaaatcaaaacaaatctgagataccatcttacacctgtcagaatggctaaaatcaaaaacaccaatgtcagcttatgttggagatgatgtggagaaaggagaacactcttccattattggtgggaatgcagacttgtacagtcactttggaaatcagtatggtagtttctcaggaaaatgggaatccatttacctcaagacccacctttctttcttaaattgggttgcaaaacactgggtttgtatgtggctttttcatagaccctttgctatgcttagccccctaatcccaccctgcataagccttcccattccataaatcaaaaattttcaatgataaatcatttcataaaaataagaacaggaaggactctattgatctgtgtcttagttagggttactattgttgtgatgaaacatcatgacccaaggagcttgtggggccctggtagtaggaccatgatacaaacctggcacatgagctagcttgttggagtccattcactatggtggaatgctatgctcaaagttaacagtataaagctgcaagtcctaatcttatgaagctatattagtttattaaaaacaattaaaacatacaagtttataatcaattaccttataaataatcaaattcaatcagttactggatgaaggttctatgatgacaattagggtagtcaccaaactgaatacagggaaaggccagttcgggcatcctctctattattgccaggagtctcacctgggatcattcttgtggagtcttgggaatttccctagcaccaggtttctccctaaccccatagtggctctctctgttaagatatctcttttatgaagtggaagcagatacccacagctaaacactgaactgaactggaatccagttgcagagaaggaggggtgatgagcaaaagtgtcaagaccaggctggtgaaacacacagaaacagctgacctgaacaaggggaaattcttggttcccagactgatagctgggaaaccagcatgggactgatccagactctatgaacgtgggtgtcccagaaatctatggggcctcttgaagtagatcagtacttattccctagcataggaatggactttgggagcccattccacatagagggatactccctcatcctagacacacaggggagggcctaggccctatcccaaaggatatgacagactctgaagacccccctatggaaggcctcaccctccctgggaagcagaaagggtataggataggtagggtgttagttggggggtacaggggaggagggaaggcagagggaactgagattgacatgtaaaatgatcttgtttctaatttaaataaaaatggggagaaaacaaaaagtagctctattacttttccattgcatccttccgcctttccaccatgcccttccctcatgttctcatcctccctcttctcccttacctttcccctattcccagcttacccagtacacctcatctaatttcccttcccagggtgatccatgtgtccatcttagggtcctccttgttacctagcttctctggagctgtggattgtagtctggttattctttgccttacatctaatatccacttatgagtgaaggaacactcctccactgctggtatgagtgcaagcttgtctagccactttggaaatcagtatggtagtttctaagaaaattgggaatcaatctaccttaagacccagtgacaggggctggagagatggctcagaggttaagagtaccgactgctcttccagaggtcctgagttcaattcccagcaaccacatggtggctcacaaccatccgttatgagatctggtgccctcttctggtgtgcagataaacatggaaccaggattttgtatatataataaataaaatcttaaaaaaaaaagacccagcgataccacttttgggcatttacccaaaggatgttcaatcataccacaaggacacttgttcaacaatgttcatagcagcattattcataatagatagaacttggaaacaacttaggtgcctctcagctgaagaatggataaggaaaatgtggcacatttacacaatggagtactactcagctgtaaaaaatgatgacctcatgaaattttcaggcaaatggacagacctagaaaaaccatcctgggtgaggtagcccagactcagaaagatgaaaaccaaaaccaggccttatttctaataacttagcttctttctgaatttgggaggaaagacttcctctctctagactgtatctggtccgatgctgtacctcttctaatgctccggtacttcaaggaccactcacgccctttctccgtgctcataaggagcatcccctcctgataatgatcattctgtaaggcaatctcatgtcagttcctctccaaaaccaaccaaccaatcaacctttgactcttgttattggaaaactggggagtcgcacatagggtgccatctgttatccaggagactgggtcctctcttggagattttgtctcattaataaaagaatttaattacaagctcagaagtaagcttggagacagttttattagactttaaaaggaaaaccacaaggcagtcaagctgtcatttttggtagggagataaagacaaggaagagagagccatgccatttttaagcagccacatggcagggaggagagcttcagagaaacagtgcaagcctacttaggctctggctggcacccaaaagcaagagctttaaaaaaagaaaggaaaagcaattcagaaaagtggtcagggttaattcagtggcagagctatggttacatagtgactgactgtaccaggggaggctttctaggaaggaaaagtacattatctcattaaagggatcattatcccgatgaatccaggcaaaacaactgaagttgtttcttttgagtatttttatcacagagatgtaaaaaagtaatcaaaacaattttggttcttctttatgtgtatgtgtgggtgtgcttgtgcttgagtgtgcacttgtgccatggtgtgtctgcagaggtcagaagacaacttgcaggattccattctcttcttctgctgtgtggttcctggggattgaactcaggctgtcaggcttgcacgccagtcccttgaaacgtttttgtttgtttgtttgtttgttttttgtttttttgagacagggtttctctgtgtagcttttggagcctatcctggtactctctctctgtagactagtctggtctcgaactcacagagatccgcctgcctctgcatcctgagtgctgggattaacggcgtgcgccaccaatgcccagccagtttttttttaaatatctttattttattttttgaaccaggttattgttatgtagctctggctctcctggaactcactccatagaccaggctgtcctcgaattcacagagatgcacctgcttctgcctcccaagtgctgggatttaagttgtgtgccacaatgcccatctgccctttaaagttttaaatgcaatttctatccaaactgcttccttgtttttgaagaatcaggcaagccaaacttaaaattcatattgcattgcaaatagaaaaccatgctgaagcaggatgtattggaggacgcatattaaaaacaaagccatgtagcaaatgcagagtgaagagagtggagggtacaggagtaaggctacatatctattcacaaccaacgagttttcaaacaggtgcccaaaccatttcatagggaaagaatcatcctttcaaccaatgatgctggcacactgagtgctcagatgtacaagaatgagtttcattcgtattatatataaaaaagtgacttgaaatggtgcagacgccaaacatagagttcttagaaagaaacactggtgcaaatattcatggggttaggttagaaatcctcaattaaaatatttatttattttacgggcatttgtgtttcacctgcatgcatgtacgtataccacatgtgtttctggtgcctaaggacaaaagaaggcattcgatcccctggaactggagttacagatggttgtggaccaccgtgtaggagctcagaatgaaatcaatctgttcctcatccagagctacatgcactctctatttattattattattattattattattattattattattattctctttttaaaaaagcttctaattattgtatttttattattttattttatttttgagataatttaattataacatttctcccttctctttcccctctcaaaatccttccatatacccactccttgctgtccttcaaattcatggccaccttttccactatttgttattgcatgtatgtatacacatatattactaagcataacccattcagttgcatcatgttacttatatgtatgttttccaggctgaccgtttggcactggacaaccaattgctgagcgcttccctggggaggaccgccattcttgctcacagctttcctcagtaagaaaaacaagtattcttaactgagctagctttcctggtattttcctggacatcaaaatcctaagggaaaagggaaaaaaataaactaacaaatagatcctggtcagaactgtggattttaacagggtctgtgtatcttggggtagcctggagttcctgacttctgccccagcctcccaaatactaggattgcaggtgtttgtcatgatgccaggctagaagcaaaaactttgtattttaaaatacactattgaaaaagtgaaagtgttactcaaagaattggaaaagccatttggaaaccatatatctgaggtgggttttacatccatagtgtggaaagaattcttagagatcaacatcaacacattaacaacccagttttaaaagggccaaggaacttaacttgagagctttctccaagtggacaaacactggacaataggcattttgagaggatgcttctgaccattgatcactaaagaactttacctgaagacaataatgagatgctatttcatacttaatgggatgtctataattaaacaaatcaaagacaaggaattgacaagaattgatgaagatataacaaactggaagcttcatagtccttatgagaatgtactatgttgtaacagccctggaaaacatttgaaacatcttaaaccatcacacaaagacgtatcaaatgaaccaagagttctgctcacaagtattcgagataactaaaaagacaagtctattcaaaatattatattcaagttttcataacagcattttccttgacagtcaaaatgtggaagcattccaaatggttattaactgaagaagagctaatccaaatttgggttacttattcattgggaaattacttaggtaaagaaaaatatataggtaaagtcttaatatgggagtacattggaagcatttttcagtgagaaagaatctagataccaaagggcacaaaccgcatcactccatttgtatgaaatgtgatgggggatgtccttttgtatatgtttctcttattggttgatgaataaaacactgattggctgctagccagacaggaagtataggtgagtctaagagatgaggagaatgagggagagagggagagaggggctgcaaagagacaccatgtagagaccaggaagatggggcacactttcaaatagatgatattaggttacgtgagtttcatgttaataaaaaaattgtatgcttgtagactgtcaggagaattcagcaggacctgtgtgataggggcttttcaaagatgaaatatttaaaatctcattacagagatcattaagaaatgaacatatctaattgctttgatggtaggagatcactaattttgaacaccaattaagcaaaatgttacccctcagaatgaatgacattcttctcagaagtaaatctagattaccaaaaaaattacactatactattatactttgaatttctgtaaaatttgtggaaatgttttctctctagtcatttaaatgccaaacaggcatgattttgcattttgactcggaaagcctaaaatattagctgttaggctagtagtatgtaacaatatatctgtacagatatatttacatctatgtgtgtatatgtgtatatggtacatatatgattataaaatccattatataaaagtcttattcatttcagaagtatttatatttccccacaaattctttttggttgagaacaggaatcaaactgaatattatttccagttagaggattcaaggcagaactttttactgtacacagaatggaaaataatactaattaatgatagttctagtaagaacaatgagaacaaaataaaaactcctgtatgctttattttgctccataaaatatgttttcattctaaatcaaagaaatactgaatttcctttataagacagctactattttatttctcactctgtgcattttcaattttaatgtaatctatatcacgattcttcaatttttataaagaaaacatctggggtaacttgttacagcatttgtcttgagctttcataatattccacaactcctctttcttatggatcgaatccgatattcatatccctccagtgctggcaatggaaggtgtttctagagactgctaaaagtgtagcagaggacaaaaatccttgacttaaacttgtgtgaagcaatgatggggccagtgtactggtgattcttccacccccctttaaagaggtagttcggaaagtcagatgggaaggaaaaagaatcacactttgctataggaaatatgtgccgagaaaggccttcagggaagtatgtaaactcataggaaagagatgttctattctcctaagaagtcaggcccttcacctccagtatccagtctagacaggcttacccacttctgaaatgcagaggaactgagttgttgttttgtggggctacatggccttagagaatgatgtagaaccaagtagttctctggcatattccttgagcaaaagactcgagatccatcatgcaacctaggggtcagggtggagatggaggaaagcacactacagtctagagtaattagagcaatgtcaactaagtagaatggggacacagggttttagaaaacaggctcctctatgcttttgcttttgcttttggattggcagaagcaagtgttctgctaagccaatagataaacttttatctattgtcacaagatgttagttccaatacagtggcaatggaaggtgtttctagagactgctaaaagtgtatctccagtctccccttataattgcaaatgtgtctcaacatatgcagatgtgagcagtgtttcctgtgtttatagatgttgttggcactgcattcccctctcctccagtctcctacatgggcagtcttagaagcttcttcttgagctgaaatgttagctcaatggattcttcagtctctctaaggcagtattaatgccactttcctccaagcgcacatttctttggttcacatagtgcactgtaattatttgactaatattcctatgaatgtctgcagagccaagaacttgccctatttgtctgcccccagcactgaccatagacttgcctggatacagcgtttatcctcctcctcttcctccatctcctttacctccttctttccctattatgtgttgagaataaaatccagtgccttgtacatactaagcatatgctgttctgaggaactgcaccccactgtgaataaaaatccctgaagagaagctgtgtctggctgtgtgtgaaaaactcctgaaaggactctgtctccagagactgattaaccaactggaatctcagtagtgtcaagagattgggaatgtgcaggttcagaagcaaattacctcgtcttgggctagttttagccttctagaatagcccttccttgccccacactgtattggaactaacatcttgtgacaatagataaaagtttatctattggcttagcagaacacttgcttctgccaatccaaaagcaaagaataccatcaaataacatttaagactatttaatgcccaccaccatgccactgtacctgtctctctggtgagcccaccaatgtattttaaatctgccttgatctatgactctctttgttctgtaaaatataaaaacttcatgaaactgcttccacgtcagaacgtggaacttggggtaacccaaatctgtgttccgggccatgatcactcaaaatgtctccagaataaacttttactccctgtaatatgagagctgtttttttttttttttttttctctacaccagcttggcaattttcatttcgggacatgatttttgaaaaatacaggagtcccaacatattaaaaatctttggaaaatatagttcgatgcatcccacatcctaattcttcagcaaaagtccctctctttttattttccctttaccacacattcctgtagcttctgtctgaagtgcaagcaccttttggagcaaagctcctataaatgccgcctgccactgtcactgtttctgttctcagatccattccagcctgcttctgttctaccactccactgagattccttgccattctcagtgatttccatctttgtggtggtttgtatgagaatatggttcccataggctccatacttggtggctagttggtgggactgtttgagggagattagggggtgtcacctccttaaaggaggtaatgatgtcactaggagtagacttgaagtttcaaaacgctggtgtcattcccagtttctctctgtctctgtctctgtctcttgctgcctcccccccctttctcctgtttcctctccacccacctctctctgactcacggttgtggatgaagatgtgagttctcggctggtccttgctctgccaccacggattcaaatactctgagactgtaagcaaaatgaatgttttcttgactacagcaccttggtcgtagcgttttatccaagcagtaggaaagttaagtcggatggtctttgaagcatgttctttcttgggcgttaggtgtccaatctctgctggctctccatatgtacaggcctctccccagtcatcttctttcccctttcccccatctccagaagttggggcactctcaggctgtttctctatccttcctcggggacattttccttgaacttttgcctgcttacttgacacctgcacttgaatatccaagataaagtcacattaaatttgtcatttggctactcttatctattacttttaaatttaggatcttaatttctcttttcattagatttgtactgtggaatctggtaacagtttgttctttgacattttcttttttcttccgtgcctttccttggatattatcgtctttgtagaatttccattgttgaagagctcatggctttaattccagcagtagagaggtatatgagacaggagcaggggctcagagctagcgttcagtgttcagtctccagccatgctgagggcttgtggagaggtgaaaactctggtgtctggctgactgcttttgcttctctgatcttcagcttgaacaccctgcccctcccgccaaaataattttcattcttgagtagaagttccactagagggcgcacatgtatcacttatatggaaaaaaacacaaaaattaaataaaaccaaccaatcaaccaaccaaccaaccaaacaaacaaacaaaaaatcaggcctagtaagggaaaacattgaacaattaaaataagtgcttttgaatatatctgttctctaactttctctccttccctcccattccctccctccctcctttctttttttcttttttctttctgataaggtctcacagtgcagcccggcctgacctggagctcactgcccttgaacttgtaatactccactcagctctgcatctttagtgctaatgctgcaggcgtgtgtcaccatgcccacttgttccctgattttctagtcatcttgattgaaaggttttatttatttatttatttatttattttgagacagtgtctcactatgtagccctggctgacctggaactcaatacatacagcaggctggattggaactaaaagagatagcagaggtatgtctgcctcagcctcctcagggctgggattaaaggcatgtactaccatgcctggtagaagaaaaaaaatttaaagtttacaaatgtagactttattttgtctacatagagaatgatcagtttcccaatggaagtaagcaagtacatttttagtatattaagatttaatgcaaatgaaagcatatgtctgcattaaaattcttctgacctctgtgggcaccagtcatgcatatggtacacagacatgcagtcaggtaaagcactcatacacataaaatagaaataaatgaagatataagatatagtgcaataatagtaagtactataacaaagttacaggaaaagttccttaaaagcctagggggaaaatgagagtaactctggtgacagggattgtcacagaagacatttgtatattccagactaacctgctttcatcaccgggaagtctcagaatgtctctggtgacagatttgtgtcctatctctggaatgaatgttctgttatctgttactgccatagccactagagtaacctcagagcaggatttagatatttacatacacagggttagcatctctaatatggaaacctgaaacccaaaatgttccaaaatctgaaactttttgaatgcctgtatgatagaaaaattccacaggtaaaattaggtgcactaaaagtattatatagaattatcattaggctctggagttaaattgaaacatgagggaattttatgtgtagacttggaccccatatccaagatatctcaatatgcctagaaagataataaaaatctggaagaatctgtattacaaagggtcactcttcccctctagcatttagcacagtgcctacaaatagggatctggtacatgattatgggatgtagagctggaagcttttctgtgtcccacctggtctttcagctgcttttaaaataatcactcagaggcttaataataattttaattgtttggccaatggctcaggcttattattaactaactcttacttttaaattaacccatttctattgattatgtgtgtcgtgtcataaacatgacttgtggctaaccagtgatgttcttacatctttctcctctggtggctgctgccgcatctctctcttgccttcttttcccctgaatttagtttggctttcccacataactatattctgccttgccatagaccaaatctgcttcattcatcaaccaataaaagcaatacacattcgcagagtacagaaggacttcccacatcacttgaagctgtggagtcatttcaggttaatatggtttgatcgagcaagaccccggccctgacaggtctctgatgggaacaagggtccaggttatccaacatccacagcagcttcaaggctgagatggaccaactatacaaaataccccaggtaggacatgaccataattctaaattttctcaggatccccataagattaccagcgtcccaaatcagcagaaaatagtatagaaaactatgcccaaattcccaaaatatcaattatgaatgttagttttcatttaaagggggttggttataaatggttgatgggcataatcaatttctttctaaagaaaagggggatatgatatagaaatgatgaaaaaggtagattattgaatctacttaattttaaaaaactgttaatctcaaaatatttcacattggtatggattttgatatactgacacaaatttaagcttaattttgttattatatatatatatatatatatatacatatttctactctcagttaaggtattatgtttatgcagaaaatttaaaactgtaatgtatagttaagaaacacaaattaatggttacctataatagtcaaagttagagacatgttagttatgttttatagatatgcagagatatatttcaaatggataggtaatcttcaaacacttcaaagacctacaggatatggcatttaaaatgttttaagaacttagacttttttttgacagtgagacatgtctgctcctggcagcaccaattactccaagaagatgatggtcgagaagctccttatgcagtttgttttcaatgtggcaagactagccatttgagcaagaaactgcacttgactagaaagcttgacactatgttacataaactggacactcaggtcccacaggaaaatgactgctgaatttgccaaaacaagataggatggtcctccagagtgcttgcttcatgaaagagtctgccagatattctacagggcacagaagaaagcaactgacgaattttgccaaaataagtgagacagtccttcaaattttctgcttcaccgagaaatctaccagacactttaggcctgtaggctgaagatggatgccccaatgttatagaaaaactttgggttactatccaggcaggcagatttctgttatttctagagcttttggaagttgtttacagtgcactttctgtttacttaggtaatactatatctttctagggtctttgatggagttgaagactagatagttataattatagctttccttagttatgataaaagataagttagatataaaactttagactcaaaaacataggatagagtatctttattctgaatacaaacagactaaatatcataattgtaattcttgcttgatacctattttgttcaatgcaattttacaatgtgaagttaaaaatcttcctttttaattagacaaaaaaggagaaataatgtggggtgtccttctatgggctgcaaatatgtgttgcttttttgttggttgatgaataaagctgctttggcttatggcagggtagaatgtagttaggtgtaaaagccaaactaaatacagggagaaagaaggcagagttgagagagacaccagcagctgccagaggagaaatatgtaagagcatcacgggtaagccacaagccatgtaatgacatgcagattaatagaaatggattaatttaaatgtaagagctagtttgtaataagcccgagtcattggtcaaacaattataactattattaagactctgcatgattattttataagcagctgagggaccaggcaggacacagaaaagcttctggctatagggaggattgtttttattattaattaattaattaattaattaattttctgaggcagggttttgctgtgaaatagtcctggttatcctggaactcactctgtagatcaggctggcctagaactcacagagaaccacctgtctctgcctctcaagagctgggattaaaggcatttaccaccagggaggattaaaaggatgtgtcaggaatggatacattactatacatatagaaatacaaaatctagaaaaacatcagaaatggtacgtttttgggtctcagccatttcagataaaaggtacccaacatatactatacccatttaatcttttctcatctaattctgcagccaaaggacacccacaatattagttcatttgagttaggtaagatgcattaaaatgaaagaccaaaaatttggagaagtgaaagactaaccttgcaccaaagatgtttgatgccttaggtctgggagatcactggaaccccagcaggcgatattcttgactgaatggtgagtttccatgagccctttggcacagcaagctttatcctatgtttgcttcataaataaggagtgataggttgtcagaatgttctgatttttgggaaaataaaccgtccgaagcttatgtcctgtgtacagccatgtgtgggtctgcatagctgtgatgaaggatgtgcacttggatgagccagaggaatacccagaggaaggaagggcacagagaaaaggtgagaattcacgatgcagagctcccccagagcagttttgtgagcaggagactgccagctgaaaacctcagaaagctgcattctcaggggccctcattgaggattccatgagcatgattttataggcaatgagctttgttgaagattggtatgttttaaagctgtagtttctcttaatgaaagaaataaaagggataaaaactgaagacatgatttgatttagataccaacatttcacttatctcccatgtaagtgatagagggaggaggcaggaggagacatgaaggaagcaacaccttgatacacatgttagacagaaaaccaacaggagggacagcaaattcagatgagagcctctattttgtaactatttcatggacctatacctttaatttccatttgtaagaagcagacatgagatttttagcattttcattaggatacaatttttgttcatgaaggctggagggaaattgcaagaattccagattgttctgccagaatttcaggaaaatacaatgatagatgaaacttaaagtcaccacaaacaaggttatactgtggaagccaagattctcaataaccacgtttatgcgttgtgacagcttataaattaaaaatctagcaaatcctaggaaataaacccagccaaccctaggaataatataatagaggtgacttttctataagaaggggagtttgggccatgtgctatattgacaatgaaaaggaaaatcattttgaaaatcgtatttcatgattacttggagtgtctatatgtcatgtaatttaaaagactaaacagatttttccttattaaattcatatgttgaaatcctgctgcccagtgtaggggcattaggggggatcctctagaaggggaacccactggcagtcacactaataaatgggattagtgtcttcacgcaagagactccaacaggccatttcatcctccggacagtatgaagacaaagcaaaatagctgtctgtgaacctgggattggagcctcaccgggcactgagtctgttgacctttgttttgtattctctggtctccacccctataaagctagctagtctgtgatatatatatatatatatatatatatatattatatatatatatatatataaacttgaatagactaaagcaaaacagaggcaagaagcagtagtgactatcaaatattactaaactaggcaagtatgtagctggaaaatgcgttgactacaaattttgatgtaaaacctgccaaccttcaaatatttgtataactcaccattgtgaaatattatttaaaagcaccaaggcagaatgtatatgttgaatcagttgggggtggtggtaaacaagggagaaaatgaaaagtagaaatgagttaaaattcaaataagcaaaagtgtcttgtgcgatgtaccacctcaagggttttcacaagctggagggtaggtctaaatctcagaagtgaacagtgaggtatttcaaagcagtcacacaacaccagagaaacaaacttaccagccgctgtttcattctctgtccgtgggtgaacagatggttgcagagttgccttccaggtataaattattatttttttgtttgagagtaaatacagcaataagtgaagctggagaaacacctctttccatgttctttttcttttttctttttggtttttggagacagggtttctctctgtagctttggagcctatcttggcacttgctctggagaccaggctagcctcgaactcacagagatccccctgcctctgcctccctagtgctgggattaaaggcatgcgccaccaacgtccggctctttgtatgttctttaatgtgagataattgtgttttgtggcccaggcattattttatgtcacccctcagttctatttcattgcttttttcagtagaggacagtcctggactgtagatcctagcaaaggtgccacgaacattgggcccctgtttaggccatctatctttctcttttatttcttccagtgtacaggggaattagccaagcctgagtttgaaatacagtaattacttaaccagaggattgcaatagtaactctttccttacctgccaaaataggcccattaccttgaaaaacgagagtattattcagcatccagatcaatatatttgagggtttttttttccttcttcttcctatttcataaaccattgggctctaactggaaaaggaaacatatttgaatatttttggaacctaaaactatagaaatcaccgtggcttccaataaaactttcaaacaaatgcaatgaagcaaagtctcacataaaaaataaaaaccagccaccctgacagcatgtgaatactagaggggattttaggcaatagatattaaatcagcatacacctcctggattacctctgcagaacattataggtggtcattctttgcatgtgtgtgcaacactttctggttgttaagggaaattcaagcctcacctcagtattgtggttttggaaaccttaatagaaaggcagccagggtctcttttcaagcagagaggcctgtctctagtcctcaggaaggttagtcagagttgaagcccccagaagtcggtgcccggtgctagcctagctgccccggcctcgggcatccctccccctccctttttttctgtcttccttttcatcagagctcctacacccaccccatctggctgcttcttctccatcttcgctttctctcataagtggtcaaaatgggaaacagaatatatctatttgttgcttggtgtggtgctcaaaaggtttttctccccttccaaattctttctttctttattaatttttattaacgggtttaaaaagaaatctccaacaaggttctccaccggttcatgcaccgacccccccccctccaccggattgtcatttgctacagtactggggtggggtgtcgcggggggggggggctgctgggctgtgtggtggcgcgggggggcgcccgagcgccggcgcggctggcagcggggcggggctgggacgcggcgcggctgccgcaggggagcggcggcggcgggcgcgaggggcggggcgcactccgcaacttcggccgcggtcgccgggcgctctccccgcgcgcgccgctgcggggcttgtgcgctggcccggcccgggatcaccctgcgcgccgcgcgcccgtcggggaccgctggcgcctcccgcggggagtcctcgcccacgcgtcacccgcagcggctgggggaccctgggacgtgcggggtcgcgaggccgagccgggcgccccccagtggccagagccggcccccatggctgggccgcgcggagccgagcgggcaaggtgaatccagccccggggcccgcagccggagcgcttggctggggcgccggctccatgggcagcggcgcttggcacgatgatggacgttaacagcagcggccgtcccgacctctacggccacctccgctcgctcatcctgccggaggtggggcgcgggctgcaggatctgagccccgacggtggcgcccacccggtggtgagctcctggatgccgcacctgctgagcggcgtccgggaggtgaccgccagccccgcgcccacctgggacgcgcccccggacaatgtctccggctgcggggagcagatcaactacggcagagtcgagaaagttgtgatcggctccatcctgacgctcatcacgctgctgacgatcgcaggcaactgcctggtggtgatctcggtgtgcttcgtcaagaagctccgccagccctccaactacttgattgtgtccctggcgctggctgacctctcggtggctgtggcggtcatgcctttcgttagcgtcacagacctcatcgggggcaagtggatctttggccacttcttctgcaacgttttcatcgccatggacgtcatgtgctgcacggcctcgatcatgaccctgtgcgtgatcagcatcgacaggtaagggccaggcggccccgtcccaggctgcgctggggatgtgccgggcgctgagcccgcgccagtctttcctgggaggatcaagccagacttcccctcgggataaagggctgagcttaaaatacaaccccacacccattcccctacaccaaccagacaacttcaagcacaggctaagcacacctttaaaagaaaccttgaaatgtttctggtttagtgtggtgacgagtttaagaccagagtttttaaaagcactagcaattccaccaggggggtccctttgcagtttttttttttttttttttttttttttttttttttttttgaaatgggtttgaaagctctctagcttgacaaaccattgctgtaacccataaaactatttctttctttaagaaataagtcaggagggaaaaggcacgatgattcccagaccctggaggatgaagaaaggcctctgaatggcctttgcattgggttcttaaacgctgcactcttaccaatgctaattctgaattttgttctcgtgaaagtctggtttcagtgtttggccatgctgtcggtttcctgcaagcttaccgactggagcctgactcctgtcttaaaggttggttctagtctttcgtcatattccttgggaatctaggaatataatctcgagaactccccagtggagcattgaagcagaggttgtccatctatcggggatgctgggaaaagaaaaaaaaaaacaaaaaaaacaaaataacaatgctgctttggggggtgtagagtaggagaatccttggaatccttggagtttcttcagattctaagaatataaggatgttgggatgaagctgctttttggccttacacatatgcaaatgacaacttgaagtatgggttcaatactctttggctacagaacaattctgtttcatttgtaatagaaaatattaaaccacaaatacccacacttgaattctgctggtgacttcaacccagcacaggactgtaccctgttgtgtttaatgatacagagaaacagttgcttattttcttagtggacccgtagaacctttaaatgtgtagatctttcagcatggggagaataattgatgcctctgcatttaaaatgacagtgcctcagaggatgcagtggcatgtagctgagtttcctccccatttcctccttgaaaaccttgctatgcatggtttgttgtgtttgaaatgttcttctattttgctgcttgaccagagtttataattactaaataaagggagcaataggaaaggaaatgtttgtcaagaaaaagaaacatattgtagttgtatttaggtagtgactcagattttttttttttttttttttttttttttttttttttgtaaaatgatcctgccattttatgtcatgacaggagcttctgacagcaaacacgggattattttaagactggagcatgaactgcctatgtgagaatattggcaccaaacttggcagctgaagttctgaattactgtagttaaaaatgacaaaaacatatgcatttacagtctggctgtgacaacaggaactcggagagtgcattccatatacataataaggatatccaggagttatacacgcacagacactgactgctcagccaaccaaaaacagttcttccatgactggagtccttgtaaatggactatagtgtaataaaacaaatatcaatttatgatgcaagtgatgtctttatagccctttcttcatcttgtaattggaaaatgataaacagcacattgcactaacttgtgagccagcttctgttgctgtaggcacattcaggttctgctgagctcaccctgtgattcctacacttggggtaaaggcatcctttctctgtgtgcacatacaatctactaccagcaggatgtcctgagcacagtgtacaggctaattcttcctggcaagatctcaactttccattaactatacccttgtgattgttacaagttatggcaataatataggcatatgttttatcttttgttcctgcaagaattgacccattggtgaattcccatctaaacagaattttagatctacatattattttttagataaaatggagaattgatgacattgacagaaatactgatgttttttctctcaagaacttccaaagctagaagttggaagaattaaaaatgtatttgtaactgaggtaaattatttcagaaaaaaagtactttcttcagctctgttgtggaacatggcagacgacacaaaatataccatcaaaacaatttattcttcattcattccccaagtaagtaaaatcggtgacattgtaccttgtactgagcaaccaagagcgagcaacactattcttcttagcccacactatgctattgtacaaatttggttatctgttgtacacataacctgaccaaagtgaaacatgaaatttttcttcaccatttcctccatgctggactacttgcctagttgtttctaatgcaaaaccacatcattttccataggcctcaaaattcccatcctgaacctctttccgagaatgaatcatattcattaaaagaaaaataaaagaagtagcatctgttagattagaaaactctcattgcatctcatcccttctcaaagagttggctttttattaatgcttatactttggtctatctttgccttttcttctctactaggtcaacttcagccttctgtcttcaagaattccttatttttggacttatttctttctctagtttttatattgcttcgtggttaagctcaaagaactgtttccacaactgtagttccttcttcactgttcagtatgtgatttcgatattaccaggtctactgccatgtttaaacttgtcttctagtttcatttcgtaccccatccatttcctcagaaaaatctagaatgatctatactgttattattgttattattattattattattattattattattaggagagtgaacatagatttattaatgaaaagtgctaaagaactcctgagagtgagagagactccagggaaggaacattctaatctttgaaaaaaattgtagttaagataaagttaagtatattaaatacacatttttttccttttgaaacaaaatcttactatgtagctcaggctggtcttgaactcataattctcctgccttggttttccaattgttggattacagctatgaaatgataataggataatgcatagatcttaaatgtctagtccaatgcatgtgatcagcaacacaggaaaggtacagtttcatcatcttacaaggccccttgtgcctttcttagctagttcccttcataaagttatgtagtcaagggtggcctcagacttgctgtgggacccaagagtggccttgaactcttgatccctgtttctgtttcccaagtgcttggattctagatctgtgccaccacacccagcttcaagttgcctaatatatagagttttaaaacactcagaataaaccttatttgttgtctttggaacttatataagaaatagaagtatgaactggtgcagaggcttgatggacatccagttcaggggagagatgatctcaggtgggttccattaggaattagcacatgttaagtatatcaagaatttttttaaatgtcttagatgtagatacaatattattatgatttgtatagctttccatatacctgaaatgtgttatgaaatttacattttgaaatacatatagaacagtgtacattctaggtacagagcctagtaaataacagagcttatctttatagtcctacacacacacacacacacacacacacacacacacacacacacacacacacacatatatatatatatatcagtatcaacctcacagaggcctttgtcttccctcattcttcagaaagtacaatataacctctattaggtactcaagagagaatgaatgaagagtaagttgttttgcaatgttcatgaggaagccactgtcctgacttttagcatcatgacatagtttttcttgactagtgatccatttatttttatttatgagttgcatctcattgtacaacaatgcaataatttgatatatatatgtacacacacacacacacacacacacacacatacatatatatatatatatatatatatatatatatataatttaaatttctggtttgtgctattacatataaagctgctctgaatgttgagatctcatatcctgaaccacaaacaggaagcagagacagcaaacctgaaatgatgagagtccttaaattctcaaagcccacctccagtgacaaacttcctccagcaaagccactcctcctaagcctccccaaacagtgccatcagctgggaactaagctttcacctgcctgaaactacagggaacatggcattcaaatagatgcaaagcagacaaatcacggggttcattatgttaattcaattacgatatgatctatatgttatttttcttattactgtgataaaatatttgataaggaacttgaggtagaataagtttgttttggcttatagtttgaggggaagttatggtggctggacataaaacaacagttcacattgttttcacagtcaggaagtaaagaaagatggatattgatcttatgactttctccttgtaattcagtctaggatactagctcatgatatagtgttgcccacattgatggcaggtcttcccttttcacttaaaacttgctggaatcattcttccagacatgtccagaggtgatgctaaattcaatcaagttgatagtgaagataaccacaaagtacctctttttaatttatcatccaaatatatcacttaaatcataccattctactcctggctcctgaagtctaattttcatcttaatgcaaaaatacatttaattcatctctaaatgtcttcatagacttcactgttcagaagtccaaagtctattctgaagctcaaaggaatgtcttaactatgattgcccataaacagcagcagcagcagcagcattagcgtcaacaacaaacactgtctttggcttcagtatataatggaatagaagaaacatttgcatgccgaaagggtggactgggatgctagtaaagaatggccagaccagggtaaaaccaaaaccattcagggtaaaccccaaaccctttaactccatatctgccatttgggactcacgacgaaatcacctgagctccaacagccttaggcagttctgcttctccaattaggctgcagatagcacatacagattctactattgctcaggggagaaggcatcagttaccccctgtgattttagctttccttggtggatgtcccatgttcctggcatctcttaaaatactggagtctccatttcaacttaagcttcaccgtcccagctttaggaaatgctctcctaggttttcttggagggaatccaactttgctacacactgcctggcctcagttgctttctggaacctgagtgaaagcccacgtgactctattccctcttatatcttttcatgcctgaagaatcaataccatgcataagacagtgcctcttgagatacagcctgggactcttgaaccataactgcagcagcccctgcacacctttgaggctgacctgggaaagcacttccctagatggccatttggaactgagaatcctttcgctagcattctctgtccagtctctgacttttcaaatgtatttgcatcattataatctggagccttcaatggatggggtctttctattatcgtgatgcagggtgagagctttccctttatgacgctaacaacttcaacaattgcagattatttctccgcacccttcttcctcacagctttaagctctctcacgctcctttccctcaccaagttgcatttttttgtattgtcctgctttgggtgtcctctcactgtagacctggttaagagcagtaaccatagccatgtctcagtctgttgggtatcttgccttgaaatttcctctatcaaacaattagtcaattatttcaaaagtcatcctcattccaatcctcaggacaggcagaatggttctttgcaagagtacaacacaaatggcctctagcctaagtcctgatagaattcttgccttactctgaagcctcatgaacccaggcatccgctttccacagttctcttggcattctggtcttccagactcttactgaagtggtccactgagctctgtttacagctagggcttctttagcttgaagatccagacccttcttccattctcacctgctgattggttctcagtgcctaggatctataatgtcggatttatcacaattgagctcctgctactaactttctttattaggtatatttcttgttgctgtggccaaatacctgaagaaaatcactttaaaggagaagtgttttattttgagacaaggtctcccattatacttagagctcaccaactggctaggctggctggccagcctgagggattcctggtttttgcttcctgagcactgggataacagatacacctgccacacctggcctttctgaacctgggtgctaggggtccaaactcagccccttgcacttttttagcaaacacttttctggctgagccatttcccaagccctgagaatgggttgagtttgaggggatatagtttactgtagtgtgaaaccattctcgcagtatcataatacagctggtcacatctcagtcaagaaacacagggagatggatgctggtgcttagcttacctgctccatttttttttttaaatccagcatcctagcccatgagatggtgatgactccatacaggggatctttccttttcagttaaactttttgtgaaacaccttcttgacacaaccagaaaatgtttccatggtgatattaaatccaatcaaattgaaatgaaggtgaaccatcacaagccatccccctaagtcttgttccactgatgaaatactgccactggcagatacccctttctaggatgtagctttcttaggatttcagctcagtgacttctccctctgacttatattttagtgtcttgagaactgtgagactgtcaaaactcccactgaaaacttttggtatgggatctttgtgcttcttagcctcctgctctcctctgttccagaattcagcaaatgtcttgagtggaatgccagattagtgcttacttggttttcttgtcctcccttctcactgggttcttggcctcttgagtctctaatttttgtctgtctggtcccaaaagattgtcaaaagctcttctggtgtttttaactcttaaaagcagttctgtgtttaggctcttcactggatcctcagccctttaggtctgacccacttttggctaatgactcagtggtattttagcctaccttcctgtcttctgtagtgcttttagtcctgaagtcctactgcttaaacagctctgtgaggcctaccagaaggtatgcatgcactttgtgttgtatcaagctttttatagttgctttaagtggaaacatgggtctgaaacatctgaaaacctcattacagcaagaaatgaatgtgtgcctgaaatagtttaaacatacaaatatagaaacagcatcatgtaaatttcttgtttaaagcccatcattagcttttcctttcatttggggtggaattaaaacccgtttggcatatggacaaggaccttgatttgtccctgtcttgctcttccacatcttgtagaatattatgttttgctctctacattctgtttttattgattttgtttttttcccatgataccaaatgctttcctgtatcaaccatacttcaagaaaaaaaaccattaaataatattcactcatatttttcgtaacattttgcgtacatgtgtactgtacaccatatataagtgttggatcacccaagagtggagttacagacattgtgagctgccatgtgggtgcttggaattgaacccaggctttctggaagagcaaccaatgcccttaatccttagccatctctccagcccccaatcacagcatttcaacagtgatggactacatatgcaattttagtctcataaaattatatcacctagtaatgttatagcctgtcttagttagggtttctattgctatgaagagaaaccatgaccatggcagctcttataaaggaaaaacatttatttggggcagtttacattttcagaggtttagtccattatcatcatggtgagacatgacagtgtgtaggagacacggtgcttactacatcttgatatacaggtaataggaagtgctatgttcactgggtggtatcttgagcatatttgagagatcaaagcccacctccacagtgacacacttcctccaacaagggcacacctttgggggccattttctttcaaaccgccacatttcattccctggcatcctaaggcctgtagccatattataatgcattcagtccagctttgctggctttctgtctttcagtgcctaagcttgactgtcctgaaatttgctctgtagaccaggctggcctcagactcagagattcaccagcctctgccttccaaggactgggattaaaggagtataccactacacctggctctagcttttctttaattccttttcacaagttggaaacttagctaggtgggatcttaccctgaggtcaccactccttttattttatttcttaatctgtttatctccctgaatatacaatttagctccattccactcctggtgcttctttctcctcaaatattttccttgctcagttttctccttttcgttatatatctttattgtagttaacaccagcaaccacaaaaacagaggctatactaggctccttggatatttcttctgccaagggaattagtccaaaactctttactttagcttcagacaaactttttggataagagcaaaaaccaaccacatttttcatcaaaatatcacaagaatgattccaaggcaacaaaataaaattcttctctgaaacatcttgagccagcccttggcagtttgaattaatatcagcaccattgtcttctatgctcctactagtaatacccactaagcaggccactgctttcctaacccaaagcaccaaagtccaattcctccaaacaaaaacatggtcaggcctatcactgcaatacccctgtccctggtactaacttctgtcttagttagggtttgtattgctttgaagagacaccatgaaaggaaaacatttaattgtggtggcttgcttacgttttcagaggttcagtccattattatcaggtgggacatgactgtgtgtaggcattcatgtgccagagcaggagctgagagtcctacatcctgagcaggcaacaggaagtggtctgagtcactgggaagtatcttgaacatatgtgagacctcaaagcccgcctccacagtgatacacttcctccaacaaggccacacctactccaacaaggccacaccccctactagtgccactccctctgggtccattttctttgaaaccaccacatggcattttgatttgggcaaataatgtgtttccataatgatgaaactgactggaaatgaacttcttggagtacatctccagactctgctgctaagaaatacctgactgtatttgtaaagccaagttcatatttgaaattctgctaattaatggtcgatgtttattctttgttctacttgtttttgagataggatcttataatgcagtctagtctgccattgaactggcaatttacatacctcagcctcccaagtgctgagattataggcgcgtactaccatgatgcacagtagttaactttgctcttgttagaaagcttaaaattgtcccaccctccagatgagcaataaattaaatgtctgaaaaaatagtaaatgttggcaagaacgaggaatgaagagaactatcatatgttagcagtgggactacaaactgatgaaccatttaacatgttttactgttgtcatgtgttactgaggacacgcatacacacacacacatattatgcctttgttactttactacaagtatatataagagaaattcttgtctattaaaagcattctataaaagtgtttagagtactcaccaatttaaaactcttgagaatttgagacatatgtgtcaatgataaaatgagtaaataaattgtgatatatatagatagttgaataacttgactatgaatcagatctactcagagatcttactaaaacacagcactgattaaatataattttagatgtcatatcattttaacaatgaatattgtagggtcacatacaaaatgttgaccagaaggaacaaagtacagaaaaacaaatatatgtgactccatgcataagaaaagtaataaatagacaacattgtgtagatgtgtattactggtgacttaaataaggagtgaacgtagctgaagaggacaagaataattatcatttctgggtgggaaagagatgtcgatccaagtgacacgctcctggggcattgcaatgcttgctttctggactgtagttgtaattgtagtttaaaattattgttaagcatccacatacattttaggcatttcctagcacaaacatgtcactttgtagcaaaaaaaacaaggctatttatttgatgacaacttgtgaagtgcatttggttctctttgagatgtatgattaactgagcagatgcagttgttattgtttagtccctgctgtttagctccctatgtgggggcaggggtcatctttgggttgttcacagttacaggaagtcatctggtgcttttccaagagccacagtgtttagttctgactggtgtctggctgaagtcttgctttgctgccaggttctatgactcattgccttcgatgatctgagtttggctgttggcattagttctgctgtgatcagcaatgcaggggcattctggcctttccagatcatctttctcttcgaaggaagtcattctttctcagctctatattaatttgcagcttgtacatacattttaaggatcttctagctttgctaaggaaagaagaaacagaatcccttgttcttttgggaggtaacacttcccacaagcaacttgaattttcttcttatgttaacagggttgctttttttgttcatagaccaattccacatatcaaattttttctcatcctccctgcagcattataaagtgattgttcttatctctatgttctgttagaggaaccaaaggtttggagggcacaggtggcttgtctaaggatatacaatttatagagatggacccatgttcaaaccaattcaagaaatatatgtttatgtgttgtatatacatatataatgtgttttgtataaatataaatgtttatatttatatgttttataactttataatttataaataaatataaaacatagaaataatattttcagaaaataacaggaaaagtatatttgtaaaatataatagaagttgcgataatatgggctaatagtggggataaatcttgtcttagagcacgatagaaatgtaaaattaggttgttgatgaaagtaccaggaagtatcccaggcacaggaagtatcccaggcaaaggaaaagcacccatgaatggaggctacaatgtagcatatgagtgagttcagagagaagagcaggaagaatttccaagagaagggatgtcaaggaaaaacctcaagccagtatgactttgccccttgttgctgattctgcagttgttccccccagtctttatcctgtccttccttttcaattatagaaatattatctgagccccctcccccacactcaggttaaggtttcctatagtgaagactatttcctagcttctcttgcagtcaggtatggtcatgttaccctatttttgttcaagagatgttaatagaactattaatgttttggctttgtcatagtatccctcaagacagcatgagccctttttattttgtcctttctcccttcttgttgcctagaataagcacctggtgacgagatgcctggccactttggtcaaggattatgcttcagaaggaggaggcatatgaaggaagggtttcgtggcttccaggttaagaactcagggaatcctaaacttcttactgattagcaattactactgcgctattacatggttcaactcaatatgaaccactaaatctaactaccaatttcctcccaacttgtgcttcctacaaatgttcccagattccttgaacctcagtgtagatgtgttattcccatttgtaaatagttcacatattgtctatcatttgatgagtgtttcctacattatgtaaatttatagaaatataacagtaaccaattatatctcactgaatcttcctagcatccttgcaagtatatttattgagaatctgacgttgagtatgttgtactttaaaaaaaaaaaagcagcactcgagagaaagacaccctgtgacagagactgggtagaggggatttttattgggggaaagtgaatagaaaaggggagaggggaggggggtgaatgtcctatggggactggaggggggcagaagagaagagagaggcagagagagtggagggagagacggagagacagagagaaaagggagagagaaagagagagagacagagagagagagagagagagagagagagagacagagacagagacagagacagagagatgggaggaggacagggctctttgaaaagggaacattgtgaatgtgcacagcggcctcttagtggttgcagctcagagcatatcctgtcagaactccaagggcagggtggtacagatgtctgaatactaacagagtgtctcttctgatcaaaagtgaacatgtatgaccactttcaagaactattctgtagctgaagatgctaaggaaacccctgcacattgcatattacaaggatcgtctgaatccaaagctcatttggttcttttacaacattgtagccggaatccaaatgagctttgaatccagttgtagagaggaaggagtgatgagcaaaggggtcaagaccaggctggggaaacccacagaaacagctgacctgaacaagggggaactcatggaccccagactgatagcagggaaaccagcataggactgatccagactcactgaatgaggatgccagtttggaggtctggttaatctatggggcctctggtagtggatcaatatttatccctagtacatgaatggactttgggagcccaatccacatggagggatactctcttagcctagacacacgggggagggtctaggcccagctccaaataatatgacagacttagaagatcccccatggaagacctcaccctccctggggagcagaaaggggatggaacagggggttggtggggggcaggggaggaggggagggagagggaccggggattgacatgtaaaagaagcttgtttgtgtaatttaaataaaagaaggaaaacaaaacaaaacaaaacaaaaaacattgtagccatagcctactgtgtaatgtgttaagaagcattcctggaatccccagacttaaatagtctcagatcgctctgcactttttccttcttgcagtcacttcaatttgtaattaaagccttgagaaattgattgtaatgaatttatgattcatgggctcatctgtacagtctacatggcaggagctgggcttgtctagatagaaattgcatttctacttcccagcagaatatctggaaagtagtaagggttcagctgtctttgtgggttgatggagggaaaaaaaggaaggagggaggggaaaaaaggaaggagtcatgtctcagattcctggatccacatatctgggcctaacttcttattcttcaacttgtacagaacatgcctcttggtgaaggtggagtttccttgggaaagcaaattagcatgaaagagattgcatggggagagcagaagcaaggagtaggcagagataatgccaagcaatggtccccccaaggcactgtaagctggtgagtcacttatggctctctgcacctgtggaacacagacattaacaagttgccagtaatgtaaaagccttagcggctgaaagccagggatggtttttatcatcatcactgcagatcagggtaaaaatgcaaacaaaattaaatgaaaattccaaagcttttccttttagtgaaatcaacacattttcaattaagctcatgaagctcacaaagaaagtcatagatgtaaggtccgaaggcagtgcctcagtagaacagccgggagtagaaatatcattgattgaacgtgtactgtataccaggcccaacaacaggtttacatgattcattttatttaatccctttaatgcttctgattatttttattctgaactcaaacccctctaaggtgaggaagacaaggacattatttcaccatagttgtttttttttttttttctggggataaagaagcaattgcaaggaggtgtatgtgtgtgtactttgatgtcaggtcctttttgccttctgcaggtctcttgttattggcgttgtgaacatgatgttaacccagctgaccacagggcattttctcttccctttcagaaagatattaatgaagatcttaataacaactgtaattataatgttagcataatgccttaatgttatatttgaaatcctttgagctggatgtatttcagagttctgaattttttttttgagtttagaaatgcagttcagtgaatgtatattatatagccgccatgacagttaattatgtgccatctttattatattaagaaacacccatgtaaatgctaaaacaatgttttctgggtatgtttgcacttcttggaaaaaaaaactaaagaccaaaaattagtagtatcggttcacataatgttctgctgctgcataagcttgctgccaacttagtaggaaaaaacctggcttttccaagtacaatttcttgtatccaaattcctggaacctgtaaatatatgaccttgcatagtaaaaggctcaggggaggttaaggtagcaggtggaattaaggtttccagccagttgactttaaggttgagaaattctcctggattgtctagttgtacccaatacaatcgtaaggtctttaaacgtggcagaggacggcaagagagttagagaaggagacgacgcagtggtgtggtagttgtggtgctagtctgtgggtggagggccccagccaccgctgctaagctttgaaaatggaatgaacatgccaacgggtgggagtagcttctggaagtcagaaaaggtgaacgggaaataggttctttttgagtctggaaaggactgctgccttctaaagtcttaatatcagccaagaagatacacaccccacttatgacccagataaatattaaataataatttcatgttgttgttaggggctaagtttgtgtccatggggaatctgatacaatcagtctgagagaaagatctgatttcagaacttttggggtgtcaggtttatcgatgagaattgtggggctgagattagttttaacatgcagtaggcactgctgcattggtttaaccctttctacagcctcataagaaggcacttttgttgattctttcttaaggtagagaaaccaagctcaggaggtttgcaaacattcctaaggtttgcaaaaaactgataaagggaagcctgggacttgaagccattggtgttttggtgggttagggtttcaatgctagggttttaatctaggcttttgtgtatgctagtcttaactatgtgtgagatgcatgatacatttctatagaactggtagttctaaagctttactttgcaggttttgatagacaaggtggcatgtggataatcgtttaccatgagcctggtttatactgagtgctgatatgttaaccattgtgattattagtattattgtgttaaagtatgcatttctatttaacagagagcctattgctggacacagaagaattggatctctaggaaaatattaaacagtcctaataagttgaaacttgtaggatgaaaattaataagataacctgtgcctctgtcatctggctgccttatatagtgttgggtgctcaggatacttgcatgtcaaagtttcttcatataaaatggagaaagtagtgaggcccatttattccaacaagttggctatccttctcttgattaacaaggcaagcttctggggcaaggttaagatgagatcactgtgggataccaggccaactccttcacaggtttaaggtataatgtaagtgatgaactttaagtaggcatgtgtgtgtgtgtgtgtgtgtgtgtgtgtgtgtgtgtgtgtgtgagagagagagagagagagagagagagagagagagagacagagagagacagagagacagagagacagagagacagagagacagagagagagagagagacagacagagacacagacagagacagacagacagacatagagagacacacagatagagagacagagacacagcgggcaggaaaaagagttaaaggattgaatgagtaagctagagatttatttaataagcaaatatttcttctttgctcactagatatgtaagtactgaagaagcaaagctgaataaagatatagacccatcttccagggctatctagcagagagtatcaggattattttgttttatttattagactttggagcttgaaaagttcagttaaagatattgtattaccattaattcctgtgcaacatgacctttcctgaaggagttgtgagtcatttagcttctagttgcaaacaattggaatgttttagctcttctatcaataaaaaccaggtactctgtgatttgttctcaaacaggctttctgtgcctgaagaattcttaaggactgctacaaaatgattgctccctagctcagacctatgataagggtcactcttctgatgtgtgttgagctaagaatgccagtcttgggatgagatcttaaggatatggattctttggggacttctgcagtgcttttatttgggggaccattcttattgcccactcatccatttatattttcattttcatcatggcctctgttctgactcaaatccttgagtgttctgtattgctgaacactctgatactttccactttccaacagacagctggatagacagctgtcttccttctgaatgtttctctcatctggaacatttggcagaaccatacactaaaggaagccatcaatatttaggcagaaacatgagagacttacagggcatgccctaatccagctgtggtcaatatggtccaactgtctttattgcagaattttattttaagaaatgcatttttatatgtttggatttaaaatgtctctgctattctcagaaaaagtctttacaattcttttttgctcacgaatggattttttgtgattttattcttgacagttttctaggcactacaggctcctatgatgctactgggtacctttctaaattccaaaggtggaaagtctttaaaaatatctactgaaacattaagacacccgtttattgttatagggaatgtatctatttacttcttcaacatttattgattccctgatctgttgtttactcttccatatcctaagcaagacaaacatgttatactctaggatcttatattttaatacaacaaagtgggcaagaaacagttttacaaacagagatataaatatattaggactatgtatgatatggaaaattaaaacagagaagcatgttagagtgggtaaccatggaaggcctttctaaggaggtaatgtaaacctaagatgaaagggtggtgaaatggctcagctgataaagaacactttctcccaaacctggtgacctgattcagtctcttgaatctatgtagtggaaagaaaaaattaactcccacaagttgtcttctaacctctacatgtggaatcccccacacacacacacacacacacacacacacacacacacacacacacacacacacacacacacacaccaaactgagatataagtgacatgaagggtatgttcatgtagtaagaagaacattccactcaaagagagcagctgttatgaaggccctgggccagtgtgattggagtgtagggcccaaagtaaaacctgggaggagatgagagtatcaaagtagtcatatgttttagggattcagggtgagtaaagagtttgaattttaagtgtggtagagccatcggaacattggttagcaggcttgacctccatcctcatagttcatgtggctactttttgagtagtaacagaggaacaagactgaaaactgggaagtccactaaaaggcttttgcaatggttcaggaaagagaaagttgtggtttgaaaagggtttagggtagtgagaatggagaaaagtagaggtatccaggatgtatctttgactggatatgagagcctcatcattcttgtgtttttgctcaagaaattcaagagacagtgatgctgttgactgtgctgtaagagtagtagagtcagtggctaaaagaaagagtggtattttaaatgataaatttggtatcagcagacatttggatataagaacccagaatttcacaaagaagtcaaggttaaagataacaaatttgagtgtggtgttggctggtttttaaatgcccccaccagactgacctatgggcaagcctgtggttcagtgttttgattagtcatagatgtgggagggcccagttccctgtgagtgatgacacatatggtggtttgaaaggaaatggcccctaaagggagtggccctattggcaatgtggctttgttggagtaggtaaggccttgttggaggaagtgtgtcactgtggggatgggatttgaggtctcatatatgttcaagtcactcagatcatttcctgttgcctgtgggatcaagatgtagccacttctctactcttagctgcttctctagcttcgtgtctgcttgcaggtcaccatgccctactacgatgatagtggcctaaacctctgaaactgtaagccacccagttaaatttttttccgttataagacattctgtagtcacggtgtctcttcacagcaatagaaaccctaactaagacaccacatataggctggtcatcctgggtgctataagaaggcaggctgagcaattcatagggaataattaagcaagaagccctcctccatggcctttgtataccagttcctgttcccaggttcctgccttgagttcctgacctgacttctctgaatgataaactaaaagctatacagtgaggtaaaccctttcttcaagttgcttattgtcatggtgttttatcatagcaatagaaacctaactaagacatgtttcactgtaatgaattttaaaaaagaaataatgggagagaagacaagaaaacacattctaatggccacagtttcaaacatttgggagataaagtgattcgaaattacaagaagaaaatgagccagcaaggtttaggaagggatggtcagtgggctatgacaagtgcctgggttgtattgtggaaattaaagggagagtgtttggtgaggacagaatgtaattagtttgctgacctggaagtcactggccatcatgacaagagtagtctcagggaaatggtgggagggaagtccgggagatggaggtgactttgaccggaggaaagaagtagagcagcagtggtagtgaggaattttcagtagcaatggcacttgcaagaagtttaggtgtcaggcattcaccaaggaatccaaattccaacccttaatcttctgcaaagcgctcatgcacacatcctgaattccatcaggatgggaaagaactttaagttcattattagcttctacaccccaagccttatagagttccgggcacacagtaggtacttggtcattttagttgaatgaatgaatttagttgtaggaataccctactataatagaaatactgtaggcttgagaccatgctcatatcttaagtcccacatacaccggctgagatgcaaatgtattcatgaatgaataaatgagtctgatgaatcttcttatagacagggaagcttcaggtaggaaactcagaggtgggaaatacttagactgaggttcctggagcaatgattatgacacaagcctggagtctcctgccaaagagctctgttgagacagaaaggagagggtagggtgtaggttcttctaaatgtgactgattccccaactgtaactttccatgtcatcccttaattttaaacttaattatttgtaattctagatatatgtcaataaaagtagtatggtggtttaataagatcatatcaataaggaggttagccaaaggtctgactctttatgaagcatccactaacgctcaatattgcagtgggaactcaggttctccagtctgccaggtcatctggaagtagagagttgtttgaatgggaggactctccaatccccttgttgattctcctttcattctaaaagggatatgtaaattagatttacatttatgagaagcctacatgtgttcttgatgaggcttcagcaaattccatcctgtccctcaaactgtacaacctgtttactaatgtcagaaatggggaccaaagtctattccatggacagatatgattgtttctgttcctagagaagggagggttcatggtagatcatcatattttagttggctcttgcctattctctgtacacttcctggatgtaaccatgccttctcctatttccatgcctcaatacatacttctcctacttccatttcctttgcctggaatgccctcccagtgcctgctggtttctgaaacattctttgagattcagttaaaatatagtagttattgggacactttccttgggttgggtattcctcccaagctttcctgtagtttgtacagcaagctctcttttctaccatcaccacaggagattgttgctttacatttatgtgtttttccctctttatcaaatggtaagacccttagtggcaggttttttatgactcctagtattctcctagttcctattgacatttggaaagtatttaatacacatttgctggatggatgaatgaattaacaagtaaacaaatcaatgaagcaggtagtgaccatttacttgaatattgagtgtaaaatatgtagctagggtaaataaaaagagtttcagaagccacaccattgatgacagagtttggacttgttgggcctgtttccttcctttcatcatagctgccagcagcatttgtctatgactttgaaagcacaattctgcttcatatgatttatgaagacactgctgattttattcccaggatgttctgtcagtaaggtcttcctgcaagggcagtcattgtaatggggttgtacctgcgtatctcattacatgaacatccccgcaagccttattgggttagtttctaagcctcggaggcacagcttgatagtgggaataagagggcaggagccactatcgcatagatatttccaatatacttgtacaacatgggaaatcagatggtgaactctgattttatctccagaactttcctaaacacatccctcactgctcattgacacacctgactgaacttcaggcctttgtatctatagctcctgtcttgattcttctctcagagaacagcttctaccctgatagatttcttggagactgggatattcttctcggatgtctcacttgtatacaggctcataataggttgtgaaaatggtcctaagttctttccatccagtatatgaagccctttaaaaatacgactttattgcacttccccatgggctttagcttgaccctataaactgttttgactaataagattttaacaaagatgatatgacttgaaaaagatgcccatttctccagctgcggctttgggatgctagttaccttgggaagaagcccaggttggaatggagatgcataactcatttccttggctgcctgttgcccattacatgaatgaggttatcataaattattcagatacacagaagatctatcacttgaccaaagacgtgtaataaaacccagacgagataaatcagacctgcctggaccaaaatggtgagctgaataattggctgctctggaagtcacaacttttagaatggtttgttactctgcaagagctaatgtctcctgaactcatgttcccatattgatttgctcatattatggcacaatgcccatccaactctctagatgggtaagtgtatgtatgagtctgtctctctaggagaccttggatatgccaatgacaggatcagtgcccacaggagcaaaaaaattcatctatataaatccaaccccattgccaggcacaaacatccattctggaaatgtgaataaacataaacagacagaactggataaatgtatacagaccaattaagtatcttttaatcttggctctttcgtcaccagcagtatcttttatatatgtcttccccacttcccacttagtgatacaaaacttggccttgagcatattatcattgttttgtattttcacattccctttgcaattctggtgccttcccccatcctcataatgactcagtctacctacaaatcaaagcaaagtcctccaagtttaaaaaagatgggattatatagccatagaagacaccagccaaaataaagccttttgataaaagccagggtttcctttttctaaattacatctctcaaatggcattatttggtgattgatattttatttagatattttcttttcaatgcaaaagacatgtatttgcaaaatgaacaattttctcactgaaagctattaatttcatcttgtctaaggtgataaatcgtcaaacaaattcatttaatgtgttgctccagtataaattgctgatcggtttgttagcactctgggtaaccccagaagtcaaatgaaaaaggcttccaacatcagaatgaaggcaaaagaaggcaactcgggtcaaagttattaacagatgtccaagaattacttgttaaataaatgcccaatgtgggattaatcataaacattaacattcactagtcaaatcctgtgctacacaatgaatattttatttaatcttcataacagccccacatggtaggttctaatgttcccattttatagattaggaaagtctcagggagtttaatcagcgtatacaggataacttggaccccggaaccagacattgttatgtctgattcagacccaatagtggctaatttagacctaatatcttaatccttgagtttcatagagaggggaatgaaaaatatctactcatgatgaatcatgtatcttaacattgcaaatcaaattactaatctagccatggacacttacttaggggcatgaagtccttggctcgcagaaatatcttatttatctccttttgagtcatcttgacgttgagagggtaggggctgaccttggtgtatatgtggttccacagatattcctagtagcctataagttttaagtttgcatatacttaggtcaagttgtcctcacaaactatcaaatatcaaagaatggaaaatggcaaagggtctgccctagtttgtatctcaacatctagtgtccacgcttctccagtcatttttcttctggaaaatgactcataggccggcttctgctggatgctgcagtagagggccaatttgtgtttgctgggcttcttcttaaaatgtttttattttccatttcttatttcccctcatttttgggaatttcgttcagttcattttgatcacattcactccacttccatcccttccaagtccatctcactttccctatccatcaaatttgtattctctctttgttgttttgctttttaaacttgtgaagttcatactgcttatatactcttggatacgtagccttcactgggggggggtagtctccacactaggatttttacccctaaagaaaactcattctccttcccctagcagctgttagttgcaaatagctccttagctagggctttatgcccacatttccttctccattctggaatttcgtttggcatgtgcctgtgctggtcttgttcatactgtcacggctgctcatatgtacaacttccctgctgtgtctggaaaacaatgtttcattgtcttcctctaccacctatggctctaaatgtttcactctttctttcaccatgaatgatccctgaaactcaggtagacgggatgtaatacagatgtctcatttaggactgagccctccaaagtctcttattgtctgcaccttgctcagttgaggggggtctatgtgttgatctttatctactcagctgcactaatctatgggtataacaggaggtgcttaggagtttgttagatactatgtccatctagcagagtattttattttaatagtgtctcccctaaggcctatggcctgcctagtttataggttcttggcctcaataatggtgcttagatatggattccaacttttggagtgggccttaagtccaatcagaaagttgctggttactctcatgatattcatgctactactgtgccagtgggcatgtctcatcaggccagtcgttactgtagttcacagttgggtaagactgatgattatttctttttcctctggtatcatgcataccactttcaagcactatgaaaactagccagtggggaggaggcttctcagtaggcaccaccttaattccttcatgacccaagaatgcgatgtcttcattagcagggtcttaaccatcaggttttggagagtaatcaagaatattggcaataccttgcaatgttttgtttttatgggcccttatttgccaacaatgctaaaagaggtaagccatttctgacattgtgccttttatttgttagtctgtggggcttactaggggcattgttgaacattttaaaaatgtttctcagccatttgtattttgtcctttgagaactctctgtttagttccatgctccattttaaatagagttgtttgctttcttgctatttaatcttttgggttctttttatattctagataataaccctctgtcagatatatagctggtaaagacttttttccccattctgtaggcattttgactcagatgttggtatcttttgctgtagaaaagacatttaatttcatgacatcccatttattaattgttggtcttaatccatgccttgtctttgttctattcagaaagtcctttcctgtcaacgagtccaagactgcacctaatttctcctcagtcacatccaagagatctgttcttacactgagatctttgattcatttggagttgcattttggcagagtgagagataaggatccagtttccgtcttttttacacaactattcactttaatcagcaccacttgtagaagatttttctcccaagtatattgctggcctcttggtcaaaaatcagtaggtactcagttctagtccactgatcaatgtgcctttcttatgttattaccatgcaattttattactatagttattatagcataatttgaaatctggggtggtgacatatccagccattctttgttgttcagggttgtttttgttatccagtatttccatattaaacataataatctttcaatttctctgaagatctccagtgggaatttccagaggactgcactgaatctgaaaattgcttttgataggatggtaatttttgcaatgttaaaccaagaacatgggagatatttctaccttctggtatcttctacaatttcctttttagagtaaagtttacattgtatatgtctttcacttccttggttagatttattcaaggacttttcttgaggctcttatgaatggacttgcttgcctcgtgtctttctcagtgtgcttgtcatttgatataggaaggctactgatttgtgtgtgttaattttctagcttgttattttgctgagtgtgtttatcggctgcaggggatttctggtgaagtcattaggatcttttatgaatagagttatattatcttcaaataagggtactttgacttctttctctcctatttgtatcttcttttatttccttcattcgtcttatagtctcagagatgcagagatgcttcagcatatgtaaatcaataaacagaatctacggcataaatagactcaaggcaacaaaccacatggtcatctcattagatgaagaaagcctttgacaaaactaatatcccttcatgataaaagtcctaaaacaatctaggactacagggggcatatctcaacataataaatataggaagcccacacgatagcaacatcttgccgagcaaagagaaaagacaaagtatttccattaaaatcaggaacaagacaatgatgtccactccccactcccaccccaccttgcattcaatttagcactggaagtctgttcatcctattaagctggatgtctgctaccctgctggcctggttccccttcccttctccatgtgagaaaggatagagattgttctcttgttgccacactgctttgtgatttccctatcccagcccacacccctgaaacattttcctggaattgtcttgagcatgcactctgtttctcactgggactccgattgaagagaagaagattttagagacggtatgctctccacttcacattctgtgaaggtaaaaactgaagcacagagaagttagcatttactgtgccagctgtcgagggatacagccagatgtagaaggctcatagacctactttttttttgtccagtaatattctgcataccccattaaggaaaaactggtgagggtggctaccttctttatgtccttgtaggcaagcccaacgtttagacattgaggcacaacactgccatccgcaaagttgatgcttgagaactacacagcattttttaataaaagaaatgaatcctaaacatttaaagtaggtttgtttacagttttgttagggccacattcatagctgttccggggtgcatgcatccttgtactgcaatcttcccatgctgacttttaagccagatcaggctcatcagtacttgggtaatttctcttgcagcctttgccttatcttctatattctggaatgaaaaaaaaaatgccaggaagggacttctctgtgtatctggtaagagatttaaaagccgtataggctgatcatttgtgtgtataattaatgcccttcagggtaatctgtttttgttcttcaagaaatgtaaagtatttatctatttaataaacacccacaaaccaaaatggccacaagtcaagatccttccatgggggaggctttcatcacagttactgagtgtgttctagcttgggttagtgatagcaggctgtttcaaggtactgacatgagatcaatggccaataattatttgttgtgtgagtgaataaatgtttatgctgttgaaggactagagtagtttaaagttagtggggagcagttttacttctttgacctctaaggtgttctttctggctattgaagccttgtgaaatgagttagaaggttgccaatgccttgattatgttttagtttgttttcttgcacctttgataaagcaagagtaataccttggaggatgagggccccgagtttagatattcctgtgagacttccttattagatgtgacggtgatccacactgtagagctgggtcgatagcactttttaaacaatatgagcacaggagagtgtttttgtaagttgtcaagaagcaattgcttttactctagtgttcaagtctcacaattagcctttgaactggcaacaaagtgggactgccctgtgggaattacactgaagtatcctacttcagctgcttgggatctgctaatatccacaaagctcgtttgtagtttttatgattctatggtggtagataataaaagaacattatcagagaccatctttccttatagcagctgtctcttccctgtggccaggatgtctgatagctaccagacctgggtaccaagtagcagtggtggtctggactcacatttaacaactcttcaaatcaaggctttacttccacaaaaatctctctacaggcttgtcttccttccttccttccttccttccttccttccttccttccttccttccttctctcctttcttccctctctccctccttctttccctcccttttttttctcagcaataatgaaaaatgtagaaagcaaacaaagattcattactctcttaaacttctatggaacaacttagatcttttattacagtatttccttatgtggaatttcttcagcctggtaactcatcctttgttatcatcttagcccagagccttctatttcaaagtctaggggctgtgtcagcccaaaaatatgaagggcatactttaaagcaagtcctgtaattttctagaccatagaagtatctttcaaatattccttcctgctttgaacatcagatttttgtatttgataaatgtcaacatagttattatgaacaaatgcaaatttcctgaacacttaaactatcatagtagatttttgtcattctgtattttttcaatcaactaacattaaagtataattactattgtgtgtgggtttgaaaaatgtttaaaatttttcaatgttttagtgggaattttttcctgagacactgccttaactccacccaactcagaactagctaaatggtgtcaatttgaatgaaaattttggcctgagttctggggtaatatttggcattttatgtctgagttatgtttgaggagggattgtactaaaaccagaggcaggacaaagatgaactaagagatagtaggagtggttggcgccaaaggaggaaatgggtcttcaagggaggtgatttgggcttctaacactcctcacaaacaagtggatatttaggagaagttagagaatggagtgcttgttcagagaggaggtccaatctcagcagattcctgtggacgagttttagcccacagtagaaaaagaggcagagaagtgacagaagaaggaatgggaatgaaaatgtaatatttctatcattattttcatcttttttttgtttaagagcaaaatttatccattgtaagtgtactgtaagtatattgaatagtgtttgtgactgagagtgttctgtatctatcaatatagtgtttgacatttctgttattccccaaagttcccaggctgtacctacacctactcttgttctctggtctcaactatgcatctgatgtctgtctttattgatttgcctattctggaaatttcatgtaaatgcaacaatatgacatataacatgtatatatgacttctttcatttggcattacatttgttaggttcacctgtgttgcagtttgcatcaatagctctctttctactgaatagaatctgttgtatactctatttgggttatccattcagtggctggaagacatctgaagagcttctacttttagctgttgcaaatataggtagattattttaatccaaaagttcaaagtccagaatactcccaaatccaaacatttttgaactataatatgttgataggtgaaacattccatatctaacctcatgtgacagttaaacactgtagtaaatatatcttataaagttatcttctatgtatatttgtaacacatccaacagatataaacagaatttcatgtttaggattgaattaatcttccacgacatgtcattatgtttatgcaaatgtactaaatatgaaaaaaacctaaaatctaagaattcatctggttccgcagataagaacaattttaatctatcattctttcatgaagattgtatacagacctttgagtagacagtggttctacttctcctaggttgagacctgtgagtagaattgctattacatatgtttaacttgtaagaccctgacaaaccttttctaaggcaattgtgtacttcaacagcagtccctagaagtttgagtcttttatattcactccatgagaataagactgattgtcagcttaacagaatctagagtcacctaagggacaaatttctaggcaagtctgtgagagagtttcttggtcaggtttatggagctggggtgacttaacttaactgtgggtggcatgactccatggtttggagtccatccatagagaggtggaaatgagtgtggaatggctcaacaggtaaaaacacttggtgcttgccaccaagcctgaggacctgggttcagtccccagaactcatatatgctattaggttttttttttttttttttttttttttttgttgttgttgttgtcagctttacacaagccagagtcatcttggaaaaggaaatgttaatggagaaaattcctccatcagatcatcaagcatgtggaaggaacccaccatgggcaaatgtccttggttctgtaagagaggaggctgacaaagtcacagacagtatttcaataagtagtattcctccatggtctgtgctgtagttcctgcctcctggttcctgccctgtcttcactttatgatgggctgtgattgggacatgcaaactgaaataaactctttcttcctcaagttgcttttggtcatcatgtttattacaaccatagaaaacctagctatggcacttaaaggtgaaaggagagaatgagctacatagagttgtcctctgaccactacatgaatgctgtggtacatgtgccccatcatatacaaacacatacaataataatttaagagtttaaaaggaggggctggtctgagcatcattcattcatctctctgcctttatatgtggatgctgtgaaaccaactgtctcagtctcttgccactgtgacttccctgtgatgaagaacttacctgtcaactccaaaacaaaagaaatcctttaagttgctttcaggaggtattctgtcaacataacaagaaatgataataactaataaaattagtatgaaaagtcgatcctttactgtgattaatttggccatgtgattcttgggtctttggaattgtttagggaaagagatgtggaacagtttgaaacttggatctagaaaaccctagaatgctgtaagcagatcttaatgggacatggttagcctgtagggtacccagaggctgatgcaactgtggtccaaagggacaggtaatttaccaagttaatgaaaggatttggcaatgtaatctgtgtcatactagtcttacagacataatagatgcgtgactgacagagtaatggaggcttgtcccaaggttccagaaggccactggagccaagcagtgtgtgacaggaagctctgagaattcagtgtgtaaagttgtaaaggtgaagcccaagtttctctggagatcccaggatgttagagatgccgggatcataggatatttgccaaagaaagctgtatgcaaagagaactgtgtgtgtcagggctggagtagactggggctagacaatttggggcaagatgattcctttatgagcctcagttgctggacatggaactgtaggatttgtgtttgcctcagtggatatcagtcttgttttgatcctatctttactttctatgccccttctggaacaggagtgtctgcgtcgtgtatatatagcttatgttattagggctcatagttaagagattgcctcatagagactctgcatttataactttgaatactatggaaactgagaagaccacagggatatttaaagttggactggacacattttgcatcttgagatggctatgaacttatggggccaagaagtacaaagttatagcttaaaagtgattatgtttgggtatgacattgccaaggcatagaatggtgatggttgataccattgccaatttaacaggatctagaatcatgtaggagaaaaaaaatctaggggaaatctgtaagagattgtctatatgagttaattagggtggggagaccacagcctaatggtgggtggcaccatttcttagaggtccatgactgagcaaaaaggtgtaagtgagttgtacatcagcattcatatttttccttcccaactatgggttctacctcctgccgccatgaatttgctgccatgatgatggacttcactctcaaactgtgagccaaagcaaaccgttcattcagttgacacttgtcatagcagtgagaaaactaatgtactcaccaacatttggcctgacagtgctgtttgataagagccactactggctgggtactaggacttttgattatgcacgttagtgaatgtgaattaaaatgtcattgtttaagttcccccctgcttggaaatgatattaagaaccctaggtaattatgtatcttcatttttgaaaggaatatttgaaatctatccctcccttttaattggattacttaagttctttgccagataattctttgtatgttttgtataagttctaagctattttcaccctttaaatttaggtgctatgggggcaaagtctctaatcatgaggctagggatataacatgaataatattcagttactctggatgaccaatctgagtcacaaagggatttgatgggacccctcacagagcttaactgcatgcagttttggttttgtcagcaattatggggatattattatattttcaacaactagtaccactattctagtatgtgaacttggtgcaagagttacattaggtactgtcaagtactttgagagaatcaagattgaggcaggaggagtcccaaagatgtcagcgtagaaacaaaagaaaacagccaggagtctccccagtggacactgggggcttctaggtgttgtatgaatgtatgcatgtacatgcaggttttctgtccctaccacctgctcccaaataactggcagctgcttcccaaatatttgactcagagactttaaattaatatgaattacaaatgcttggccaatagctcaggcttgttactagctaactcttacattttaaattaacccaaatttgttaattaccctctgcccacgtggtgatacttttattaatataacatgttcatcctgctccctctgcgtctcttggcatctcttctgactctgcccttcttcttcccagcattctcagtttggctttcccagcccaacttccttttgcccagctatagccttgtttattaaaccagtcatagcaacatatattcacacagtgtacagaaggattattccacaatatatgcacatgtgtatctgtatgcaggtgtgcttatccatgtggacatgtgtgatggcctcaattaggtcagaactttttttcttttaaattgcttctctctctctctctctctctctctctctctctctctctttctctcatgcgtgcgtgtgtgcgtgtgtgtgctctgtgtgtgtgtgtgtgtgtgtgtgtgtgtgtgtgtgtgtgtgtgtgtgtgtgtgcttcttccttaacctctgaagccagtccttttggctagaatgactggacagagtgaccctgtgatccatctgtctttgtcctccagttctggggttatggacaggcattgatatgccctgctatgtctatgtgagttttggggatctggcctaagatcctcacactggtgcaatcatcacactgagcagtctctccagctcctattaggggttttgatctatgcagactggaatggaggattaccgtggatttaaggttttctctgagacattgaacgaagctcaggctcttaagagaatggtgggagtctctcaaaatgttcctatgtgtacttctcacagcccagaggatttgttgatagagaataaactgatagtcttctaaatgccccctggtgattctaatgacatcaacttttgagaaaccctatggagaacagacacaccattgctttgagtatgattgtgcttagtctggaatgagctgcatataagaatgaattgcattagcttttgcaaacatggtttcttcttcttcaataaaagtagaaggaagacagtctcatctttgtattgttcctttaaacatgtgatcatgtttaatgtcaactacccgtttaggttgagttcattctgttttttttttccaagttagaaaaccaaggctcataggtagggactagcttactccatcacatgtaagaggagagtccctcattctcagagaatgagcattcttcctgtgaaaacctgagagctttcctgttgcacagtgagctttccccaccaggaagataggaacagagccttctaaatcagcatggtgtatggacccagagaacattgaagcttacttgcaattcttcaaataattcttcatttagatacggttattttgggtatgattctatcaaggttgcttatctggcgtccctgttgtcaggttggaagtagaaaataagcaaagagagacaagtagctcacagcaggcatattaaaacagcagagttggagtcctctcatcttggtagagaaagggaaatggcttcctcccctgaaaagctagtgggctgagccagttaatctccatggtcccttacagctgtaatattcagcgtgttcaagacaaaagctataaaaagctggagaaaagcattcaagaatgaaaaacctagaaatcagggcctggtatgggagaaatgttcctagcctagctgctcttgagggcagggttgagacacacacagggtggtacctgactgttgtgctaatgatgctgagtcattagatgggtttgttttatagatgccctttcagactgtgagaaagcacacaagttactttagaaagattgcacttaaaaatacaaaaaattttgctgtttaaacatccactgcttctaaaaaaaatctttgaaggactatttccctgatacagtctttgttacgcccagatcttggagtctcccaaagaccaacaaggagtccgaatctgtatgcaaaagcaaagagcctttactcaagctcaaacttgtaacacaaaaaataaaagacccagagactgatattagggttcaagcttcaagctgaatatcagaaaagcaaagcagccagctgtaggctctcatctctagctcaggcttgaaaggtttgatccatgaatgagctcttcaccaagtcttaaactcctgcctctcctcagtgtgtctggagaatgaatgcctctctgagaccttgcttctgtcttacaaactgccctaattttgggattaaaggcgtgagctataattctcttttagacagttcactcttgtgtagatctgggtggccttgaactcacaaagatctgtttacctcttaatcctgagtcctaggtgttattcttttgtttaaaaagaagaaaatgaaaatgctgagatatgagacatattgactataagtttattacaaggcccggcagaatggggagactaagaagaggaaaggaacagggataatggctgaccgccatggccggtcactgcagagagagcacataggtgagagagagagagtagagaggaaacagctaggaagcagagagggtaaatggacagggacctgtcttttaaaggggtcctctgcacctgtgtgcagacttagtttccatggaaccttgggctgaccagggtactgcctgttcctccaggtaacaggggcaggccagcataatgcctgaacctttcattaggattaaagttgtgttccacaacctcctgtcttcaggctgctgggattaaaggtgtgtgcctggcttctatggcctgtggctgattttgctttctgaatcctcagtcaagttttattaaatcttgaacaataactcaccacacaaattttgaccttccatatgtctaaggcagtggtactagatcagagagcctcaagctcagttgggatgggggtattttatcatagcagaggttggggtgagggatttttaaggttcaggacccctgactgactggtatttgtctaggggtgtcttggtgaaaggggatgggaatgtgttgttctaggggacatctggtgatcctatatctacaatggttggaatgttaggtatttcctttgaaatgttaggtattttccccttggatgctaattggtcagttcctgggtggtacctttgtggtctttcttggagtcaggtgttgctttagggtaaatgaaaacttgggcctactttctagctggtctccattgggcctgtcatggcagcagtgaagccaagctgccctgagccctacagttgtttccttttccttttgataagtcttcatatttctttatgtaaactcaaagcacttgccatcccagattgtactttctactttgataagatttccagtccttcttactgtatgtgaatgctgttgaacttgaacctaaccttttaaaatagtcttcctacatggttttatggtcactgataatagattgttggttccttgaagacaaggactgagctgccttttgcttggcttctactaaacttccataaatgatgagtcttaggtaaataattgagtcaaggaatcagtgaatgaatgaaatgcagaataaataaataaataaataaataagatgtcatttcccctgaagagttgtctttttcatttcagtactcatgtcttgctcacttttctattcccatcaccttaccctgtctttccccacctgtgctcaagcattcttttctaatattaaactgttgttatcttccttgaattaacctcctctatggtcattgctaatgatttattttaaagttctgtaagtgttttgtcacagatttttcccgcttgaatcccttagccaactttccttgactttagcataatacttgagaccatcaatctaaaaagagacaaggtttactttggataacagttctggaggtttcccttgatggtttgttgactgcattgcttttggttttgtgcacctttgggagaatgagatcagagaaaaccctcaccctgcaggtggaagctaaagagagaggaagaggagggacccaccaatccccttcaatgacacaccctcaatgatttaagacttcccactagactctacctctgaaaggttctgccttctcaaaatagtaccatatgctgggaaccaaacatttagtacgtgggccatttgggtacaaaattgcagaccaggaaagtacctattatagttactttttaaatggctggaatataaattccatgatggcagtgttgtgttttgattcagcagcaggcaatgaaacacaaaccacaaaactcaacagagcccgtgtggagtttattgggggaagggagcaaagggaggggtaagtgttgtccaacctggaacagagatagaagggaaaggggaaggggaaggggaacagagatggaagggggagaaggggagaggagggggacaagggatgaactggtgggaggtgccgcttaacagggaaagcttgcacatgcatgcagggtccttacaaagtccttacacagccacataatgcttaactcataacatagccaggcaacacagggtcccttgagctgtcttaagtatctgcctgaatgccggtgtgggtatcttgcccattgtcagggggtggggtcagcgtattgccaggataccaacaggcagatctaatttgttccctgtgtgtccgcatagtgcttggatcacagcaggctctgtgtaaacaccagtggaactgagagattatgggcctggtgtatagataattttgatgactgggctctgtctagagctatttttgatttgatattagggttttattaacataaaatgattgtgtagcttttcatgcacttgtttaatctattcatcaagggggaaaactttaaattcatttttaattgtgacaaaaacacacagtgtaaaatttaccattttgaatattttaagcatctattttagcagtgttaactgtatttaaattgtggaagagatctttagaactttttcaacttaaaaacctggagctctgggctagagagatggctcagaggttaagatcactgactgctcttcccttgagttcaattcccggcaaccacatggtggctcacaaccaccttgaatgaggtctgatgccctcttctggcctgcagggcacatgcaggcagaggactgtatacttaataaataaaatcttaaaaaaacaaaaaacaaaacaaaaacaaaaacaaaaacaaaaaaccctggagctctgcacttactgagtagcagctcacttccccttcctgagatcctggcggccactattcattgatttggattgctttaggtactttgtaaatatgaacacatacgtgtctttttattggaggatttaatatatcatactcaagggtcatctatgccataaaatgtgacaggacttagttccttcagggcttaaacaaatattgcattgtagatatgcttcaactttctttaaccatttgtcggtggatgaacattgggatagctttcacctcgtggctgttgtaagtaatgttgaaatgggacctacatgtgcggttatctcttcaagatagtgctttcctttcttttggctacatcccagactcggggctggcaggtcacatgacaccacatctttatcatgaggaatgtctataatgttttccataggcttctgttccatttgtatctccaccagcagtaaacactttcagatttctccagagctttttccacatttactttttgtcatgttgcctatagtaatggggatgaggttataagtatcttttttgtggtttgaattctcatttttctaattattagcagcggtgagtgtattttctcacttttattgtgcatttaatttgtatgtgtttaagagcgtatgtgagaacatatccatgggtatgcttgtacatgtggaggtaatagactaacatcatgtgtcttcctctatcactgtccaatttattcttttgagtcaatttattctctcattgagcctgcggtttgctgattggctagactggccacccctagaacccaggagtgtgtttcttcccacaggtgctggagtttcagacatactctgccatacctgttgctttaccagctggggcctctctctggttactggtatcttctttgaaaacatgtaaattagttgcttgcatatatatatatatatatatatatatatatatatatatagtccatatatatggattttaggtatttatcaggtgtattattcacaaatatgtgaagtattacttctatattgtcaatgaccatttcacccttttgattgctttatttgaggcatagacttataaagtattatgttgtcacgtttctccatcttacttctgttgcctgtgcttttggtatcataaatgaagccattgccaaacttactgtgagaagctttcctcccatgtttttctaagactttcatagtcttaggttttgagaccatttggattgatttttgcatgtgataaaacaaaaggatctgtctttgttctattgcgtgtagatacttagttttctcagtgttggttgtaaacaagactctcctttctctggcggttgtgaaaaagtcatttgactatttgttagtgcccagaacttgtttctaagctctgcatttacttcttttgggctgtaagcttgtcttcctgacaatgatatactgttttgacaatagcagttttgtagttatttttaaaacatgaatcatttgttttgttccttttcaataataatttatacatatgatatgcacactaagaatgtgcttttctatatctgcaaaatacatcaatgagattttgacagacattgcatataacataattattgcttttacaatatgtaattttaacaatattagtttttccagcacatggatatgggatatatgggatgttattttcatatatttgtgtcatctttaatttgtttcagtagtgttttgtggtttgaagtatacatgtcttttggctcctagactaaatttacttcaaattatttcattagtttttttattgtcaatgtagacagagcatgttttgaaatttactcccaggttgtttataaatagtacataaaaatggaaatgatttttgcatgttgattttgttgattctgaaactctcctgaatttattatctataacaggattttattaagagggaaactttcaagagtttctggacataagattatgttgtctctggacagagagagttagactttcttttccagcttgagatgttatttatttgtttagtctaaattctccacctaggacaagtggcacactctgagttgagtagaaatggcagggcaaggcatcctttccttgtttctaattacagggaaaaaataacttgcagtctttcagtattcactgttgctatgatgtgaatgtaaatgtccttatgtgctcatggactgaagatgctggctgcatgtccatacgtacactgtgtacacacccagtatccagaggggccagaagagggaggtgaccctctggaaaccggagttaccaagagtcgttggctgccatgtgtgtgctagaactcaacctaggccctctgaaggagcagtacttgctcttaaccaatgagccacctttccagctctgactcaggacttataattacaagaagtggttttccgcctgtgtgagagaagggcagagagaggctgatgcaccagggtgaacacagttatatttttgtttgggggaatggctgattcattcatggtgttggttttgttatttttaactgtatagtaaattaaaatgtgtaagtaaaatgtgggcctgtgctgatattgttttaaatcaagaattataatcagtttattcttgtgccattgcagagaaaccaagccccaaaagtaccaatataagacaaacaaacaccccccaaacaaacaaacaaacacaaccctttatctttcagatagatgtcaatgtctccagaactagaggcttggtgttgttttatttttaatagcccacgacaccttgtactgtactagaaccaagaaatttgaagtttggaataatggaattatgattatgttctggccatttatgtgagtgtatgggatgaactcatgctgtactggctggttttgtatgttgacttgacacaagttaagagtcatcagagaggaaggagcctaaaggcattttttcaattcatgatcaaaggggagggcccataccattgtgagtggctcagttcctgggctggtggtcctgagcaagccagtaagcagcccctgctccatggcctccgcatttgctcctgcctctaggtccctgccctgtctgagttcctgttctgacttccatcagtagtgaacagcaatgtggaagtgtaagctgagtaaaccctttcctctcccacttgctttatggtcatggtgcttccctgcagcaatagaaaccctaactaagacataggcagacagaattttgtttcatcctctctttaatttcatccttttaacaggcacttgattttttttttttctgggagacagagacttctgagctgcatgacttctctttttaaagttctttagtgtcatatgtctttaacagtatgccaaaaacagatttggagatttcccaggtaagcagtaaatagtgataggggacagtttcgactggataattcaggttcaaggactcaggaaatacattttccatttgtgagatactgctaagatgtgacagactctgatgatcccccatggaaagtctcaccctccctggggagcagaagggggatgggataggggattggtggggggcatgggagagggaactgagactgatatgttaaaaaaattatttctaatttaaattaaaaaagaactaaataagtttagaggcttagaagcttaaggagaagaatctttctatacttcctaaataaataaataaataaataaataaataaataagacaaagaaattgtagtgttatcttgaaggaatgaaaaaaattaaaaggagccaggcagtgtggtggcacatgcctttaattccagcacttgggagacaggcagaagtcctagtttgaggccagcttggtttacaaaatgagttccaggaaagccagggctacacagagaaacccaaaagaaagaaagaaaacaaagttgaaagggagaaccaagagccagtttgaagaaaatgttgctttttggttcattagacttagggtgttgggatcaaaacataatgtgcagaggctggagagatggctcagaggttaagagcactggctgctcttccagaggtcctgagttcaattcttagcaaatacatggtggctcacaaccatctagaatgagacctggtgccctcttctggtgtgcaggcaaaacactgtatacataataaaaacagctttaaaaaagcataatgtgcatctttgttttaagacttgaggtctgttacacacgcatacacacacacacacacacacacacacacatcagccttacagcttcttgtatttttgtcttaatttaggatctttaagatgggtagcacccttgaagttattaggacagacacaagatggaaatattttatcacttaaaggccaacaagaacatatggacacctgcaggacattcatgggagtagagagaaagagatgtgggccagtgcctttaatggagcgtgtggtgatactttatttatgatttattaaagcttgcctgaggattcagaaagcatagtcagccacaagccataggagccaggcacacctttaatctcagcagccagaagctaggagatggtggtacacacctttattcctaggatttgggattaagaggtaaatggatctctcagagttcaaggccacccagagatatacaagattgaatcagtctaaaagactaacatatcacttgcctttaatgacagcactagaggggtttaaaagatagaagcagccgggtgttggtggcacacacctttaatcccagcactctggaggcagaggcaggcggatctctgtgagttcgaggccagcctggtctccagagtgagtgccaggataggctccaaagctacacagagaaaccctgtctcgaaaccccctccccagaaaaaaaaataaaagatagaagcagagtcttcagtattcagtaggaggcattcattctccagccacactgaacacaggaaggctcagtatcattgaggataggaagaaattgtagtctcaggattctccagccatgctgaggaaaggcagcagtttgaggcttggtgaagacctcatgtgtggatcagcccttttaacctgagcttgaggtgagagctagtggccagctgctttgcttctttgatcttcagcttgaatccccaaatctgtctctgggtcttttatctatcatgctacagatctggaagaacttcagtgatggggactcttttctgtggtgggttaatgcaggctgtgcagtgtggaagtcaacagggtctgttacacaggccgtaactgtcacagagggaagtggctactgggaggcagttatatgaggcagttatatggattggcctaattgaggaacttggaatgtagtcaagggccactggcttctgttacaagaaagtccagcatatgtttcaagtggttgatgaggcaatagaaaattgtaagaattctctacaaggttcttcttctttcggttcacatgagaaaaagcatccccacacaactggacctctcatctgtcttgagtaccgtctgtcttctctggaaatatatatatggtatttttcaggtctctctgagttctattcagtattcaatgtgccacataaacgctacactgtgcatatacccttcctttaacatccggttagaatctgtcatctcccaatctatctcctttttcattcctttaggtattgtgtgtgtgtgtgtgtgtgtgtgtgtgtgtgtgtgtgtgtgtgtgtgtgtgtgtgtacgtatattgtaggtgctcacaaaagagaagggcttgacggattggcataaaaccttctgaacctgtgttttaaatgcagtatcagataggaaaggcaaaacggggatgaatggaatcattaatggggttgctctattagttagaatttgtgatgttttattcttatagtaatccagaggagtagcaagctggtttaataaacctcagaagcaatctgtgtgtcagacagttgcagccacatctagtcaagtgtccatactctctcgttagctgtatctgtccacctctttgcctggcatcaagaaagctacacagatgaatagctgaaaatggcagccttttaaaatatgcttatttaatttagacgttacagtattcttaatagcttgttccctaacagacgcagtagctcaaagagtaggaaatgcttgcttcaaattaaagtcatggcaagtaagagtgcatgtggttaccggtaagtgttcagccgaaagagtcagttaatgggttcttcagtcagtttaatttgtcaccatttggcagaaaataccacaggaatgtatcttgtcacttaattgagcggaacacacaaatgttacaagattggatttggttgcacaattttattcaaatagatatgtgcaggtctggattttttaaaatggaagaaaaaaaaaagcaagacctgcaatttttctaatcagtgtcatcttccgagaggtccaaatatatttccagggcagcttggcgtggaaaggtcccagaaaaacaaaaaaaaaagcacagttgatagaccctacagacagagtcacttgggacctctgtgtcaagagataagagtgaacgacagtgagtgtgatgttgatttttaagtcacttaagaaaggagtaatgtaatttaacaaggaagttggaatctaaagattgcagaagcctagcagtggtttaaatagcacctggccggcgtgacagaggttggcctgggaaaggtccactgtgtctaactcttttcttttttccaggtgtgaacaataacggtgtgtgtgtaagtctctagcataatatcaaagtgtgtgtactcagtccttgtttttaagaaaccaagggatgaataagttaagaaagaagaatagcaactgcaaatcttcaccgaatgagtgtttcctacgtattaaacacaaaggtgctcataacaaaaccaggacttgaatattgcccttcctctattatggagaagaaagaagagacattggggattgtgttcatgtccaaggttgttcagcggacatcagagcctgggagagagagagagagagagagagagagagagagagagagagagagagagagagagagtaaaggtcaggggacaaccttgagtatactttctcaggtgccaccacatttcttttctttaaacttttttacacaatactttttgattttatttcccccaccaacaactcccaaatcctacccagctacttacccacccaacttaatgttctctctctctttctcaaaacagaaacaacaacaaagcaaaacaaacaagcaaaccagaaataaaaacaaacagaaaaaaataagagaaaaattgtcaaaacaaaacaaaagccccaaacaaagcaaaacaaacaaacaaacaaacaaaaaacccgtggaattccttttgcattggccaactgctcctggatacggggcctgtggtgtgcttgatataggcagtaatgcaccagtggggaaaactgagtttcccttggccagcaagtatcacttgcaaataacttcttggtgaggtgtgggacctggtgttcacgtaaccttctccattctgggattttgtcaagtttgagtctttactagtcttagatttgtgctatcacagcctctctgaggtcacatgtgcatcagtcctgttagtttggaaggcgtcacatagcaccgctggctcttaaaatctttctgcctcctcttctgcatcggtccataagccctgagaggagggtgtgatgaaggcttcccatttagggctgagtgctgcagtctttcacccttttcaccttgtccagttgtgagtctctgtgttaattggcatctgttactggaagtttttgtgatgggggctgaacaaggcacaggggttcctggtggagagtggctcttcagctcattgggaaccataaaacaatggggatggactagaaagaaagactggaaggggcagagagaaaaattcagtttttctgtttttgaggcaggatctctcactgacctgacgttcgttcatccagtggctgtccatttgtctacctatctccacttccctgtgcttggattacaagtctatgccacttttaaatttttctttatatggcttctggggagcgaactctggtcctcagtgcttctgaaaaaagcattttatcaatttcagtcccatttatcgttccttaacctccccagatcaaaatttggaatcactagagtataccaacaaaatgcatttagtgggacagtgtcatctctgttgatttattttttgtttagctgtgtctgattttaggcaattttgccaggctgatctttctgtttcggttctaatttccatggaaatgtgatgattcttaatcgtctcttaaccgtcagcagtccatttgccatcaggaattggagaaacagacccccttctcagggcttggattgatgtagaatctgatcttgccggagcttttccacagtctttacatttcaagcagatgcattgatgtacacgtggcctccctcctgacagttttatctctggcaaaagagaagagaatagcatttaaaaccagagcccaggctattttcctttctgctttccatttcaatgactgttgattttgtggcttgggaagactgtgtttaaagaggatataggaggaaaaaaaatcatggaagaagagtgaaagcgcaggctgggaggactgctgggtctttgtgccatcttgcagatttttctacattttgttgaagaacaatgcaaagcgtagtttaggaaagaaaaaatggtatttatttcagagatacttatttaccactgggctcagtagtcacttagcagacagatgtgctgggagattcaagaaaggagaagggcaagtcagcagatgcactgagactttttggtggtattgagagggcctggctggtggcggggtgcagactggaaggactgaactgtagaggggacacttgagcaaggtcttgagggttgagtaggagttctccagattatgaaagagtggcagactcttcttctgttcccctggctttggtctgcttatgtgcttctgacattttcacatcttttccattttttaatttttccattttttatgtaaaagagaaaagatttcagaagattcaaatcaaatatcctcttattgcttgtgtgtgtgttttaattttttgttctttgaaaatttcatacaggaatacagtaaatcatatccacccccattctcttcctccagatcccataagagcttggcaatatcaatgcaatcctctgaatggagtacagatacaggtttgtttaattttacactagtgtgtcagaataacaacctgtaaatagttagtaaaagagagtttggttcctagcggaaaaaagatgaagaagttttagttttcctttagattttgtctctggttgcagtcacattcctggtcttcgaatgatttgtttacttggctttgcaagttgagcactgccacatactggtgtggaacattagtttaaaatgtgagacatttgtttatgctgtggaatatttgtttagtgatgcaaagatgtgttgcagtgctgcattttttttttacgttgcatttgtttaactccatcaagctgttactttgcctgcctaaagcacttgattggcctaataaagagctgaatggtcaatagctaggcaggagaaggataggcggggccaggcagagagaattaatagaagaagaggagaaatggaggagggagaaaaagaaggagagacggacatcagcagctagccacccagcaacacaactagacttggagtaagaagtaaagacatagagaataaagaaagataaaagctcagatgcaaagggtagacagggataatttaagaaaagctggctggaaacaagccaaggtaaggcttgacacttactcataaatatgaataagtccccatgtatttctttggccggcccccatcagcaaagagtaaataaaacagccacagagtacagggtcacaattgagaatctttcttgtgagaacctcacacagagctccacgaaaaatgttctgcattgctaatgctttaaaactctcagcacatgagtgatctgtttggggtttgggatattgttctcacactaaagaaccacatgttaacccttacggaaagactgttagtgagagcctacccaggaatgccaacctttgatttgggctggtgagatggctcagcaggcacaagtactggccatgcaactcgactttgatctctgaacctgcatgcaagtggaaggagagaaatgactcctgagagtggtcctgttctctgacttccacacgtgcctggcacacttatgctgccaccccactgataatagatgtatattttagaataatgcacctttgggtaagcagaaaggagttgtgcaagcgactgccagaggtctgtagagtggtggcaaagatgtcctggtgccgcctgcctggtcttggcagtgctaagacccactgcatagggtcttcttgcctgtgtcaggcgctatccactagatggagctaattcttggcactgcagctccagccccaggtaaatggaattcagtaaaaatggctaatcaaacgtttagggaatacccacgaagccacaccctgtgggattgcaaattgtagatgacaaagataatccaggagggggcccttgtagattaaaggagggcagagaaccgctctgtgcatcttagcctgtgaaatgtgcaagcttggccttattgggtacctagaacctttctagctttcccagtgtcttctagattcctacatgtccttgtcattccaatgagatacctttgtcattaaacaattccctgagaaaaatttagtaatggaggggacagtttctctatgaattctgctagctgggtaggtgcccactaaggtcttcatggggctgtcttccctgggctggctcttgggttgctgtctccattcctcttgtgtgccttcctctggtgctttttatgtacatcgaacaaacatcttggaggcaaatgtcaagactaggaataagaagggcttaatttgtcacatcaagtacagctgtgtgtggcactgcaatttgcattttaatgtcctgcttattccagaaaagtggcgttttatagatttcctgtattattcatgaatttcaaggctttgtagtttaaaaataaaggttcaggtaatcaccaggcataagggaagttaaaccctgtcaagtttgctcattccttcctattctcctcccttttccatctgttgaagtctttcatagcccatccccgtgttcttgtgttccgatgtcaagaggcacatatatacagagaagttagtaagtgtaccacatctggtttcacatagtcttcaaatttgcaagactctagttggttttaaaaaaagtcactgacctgcacagagagatatggacagatccaccataatagtcaagtacctgctggaaaggaggccgtagcctgcctgaggcctcttggaatctgcagtatgctgttgttggaggttcttgtcctgccaggtcccacagctgcttcagcccccaaataaatacacagatgctatattaattattaaactgatggccaatggctagggcttcttattggctagctctgtcttaattattaacccattgctataatgtatttccatatggtcttgacttactggagaatgcctggacctgttagtcctttgtggtctacatggtgtcctttgcagtctctctctgcctatctttcccggaattctcctcatctcctagccctgcctatcttcctgcctctactggctattggccaaacagtgttttactcatcaaccaataagagaaaaaaatatacagaaggacatcccccataaggatgctaaaggctcctgctggttattcagattgttggggtgtgtggagttggttaaactgagtgaagaccaggtattcatcagcctctctttcaattatgtgagtatagactgttcaggccacagagaagcctgggcttatgtgttgaggaggccccatctatggacatgcctggaatgagcagtgtttaagatggaagccaagtggcatgaaagtaccccacagaaaggccacctccctatgctcacatgaatttaggggagcaagcacactccaggggcagatgtgttctgttctgggctgcttggcaggcagctcagcgcttgctttctagctagaattgctttgtggtgtagtcttggctcagtccttctcattagatgtatgacacagtcagaggagtagtaagaaaagggaaaatcaagatggtttgaaggaccatgtaaaaaaataaaagtgaaccacggagatactgaaaagtgatcacaaaatggaggctagaggagggtcttcatgagtcttctgctgttacttgactgaaatgctgtcacatggcccctggtagaagtgcaggggtgacattcatatagtgcttgtttagtgccaggtactgagccttgtgttgtatggaggtcttgtgtgtgtgtgtgtgtgtgtgtgtgtgtgtgtgtgtgtgtgtgtgtgtgttgggtaggggtgggaccaacagactgacagatgggggcggggctaaaagtaacaactgaagttgcatctaggattttaaaagttcctgaactccattgacttttttcgtgagaagacagaggtcaaattgctacctttttcttttctagatagggtctcactatgcatgttgatttggctgagatgttccccatagactcagacatttgaatacttggtgtccagttggtggcattgtttgtgtaagtataggaagcatggccttgctggagaagtattttactgggggctgactttgaggtttcaaaagctacataccattccccatttatttgctctatttcttgcttggggtagagatatgagctctgagctgttctagtcaccatgtcttctacctgctgccatatttcactgccatgatggtctgttatcctctataagtccaaataaacttccttctgtaagagtgtcttagtcacgatattttatcacagcaacacaaccgtaactaatatactatgtgtgtctcttggctagcccggaactccttgtgtggaccaggaaggtctcacatttgctgtgatcccctgctcctgactttctagtgctcaggggttcactaggcttctctgtcaggcttttgattatgtaaatccaatatttatatatgttggagtgatcaaatatattttgtttctgattgcctctaagtgatgtctatggatcaaagaagtcttgctacagttctgtgtatctcattaaataggtaactagttaaataatacttgcaactagtatttgtttgatgtttatgtcatgccagtcattgtactaggatgtggctttctgtgctgagcaagggcaagcatggcttccattttaatgatcttaccttcctgcaaatcctgataaataagtaggttcctgtaacacagtacacttaatgagaagatatccatggagtgtagatcagggcactcatgtagactagggtgttgttctggagagtaagcatccaatgtgagatcctgaaagggtaggtcttagcctgaggagcaccatggaatgctctaggcagagttatctgggcagtggtgggagccagagtcctttccagactggttgacagagtgcacactgatgaatggattgggaaatgatacagtgctggtgttggcagtgccaagttatgtgtgcagctgccacatggtgttctagataaaggtgagattcaccaggcttgttcatgattgagtttctcagaaaagaaaatggtcacagttaacactcattaatccttgttcctaacacctcttggcttcctgatcctccagttgttgtgacttagttgtagatcatttgctgcatataggatgccctttgtagtgaggttgggtgcatgcctctaaaatttgtggtattaatataattctttattatagttgccactcattgtttataaactccacaccaacctttgaaccaaacattttaaaaatgctgttatttaagttctaacacagtcccataagaaagactctagtactctggtcgtataggtgaagactagaggctctgagagatggagtaatatgctttgagctttcagtaatgctgggattcatgcctaggttatttgttccaggggtaaatcatagactccaaaaagtttgaggttcagagaaagaataacatataggcattgatcatacaacaaagggaattattagtgaggcatttcagattagttttgtgattgattttaataaaatgaagataaataaaagttatctattgggttggctctcatcatgatcagatagtgccatgtatatttaaaatgttttagatttatttgtttttgtatatcagtgttttgactacatgtatgtttgtgtgccatgcggagcccatggaggtcagaagagggggttgggtctcctggaactggagttagagatggttgtgaaccatgtagattctgggaacctaatctgggtcctctgtaagagcaacaagtgatctcgactgctgagccacttatccactgtgcatatatggtatattttatgatacaggtaatttataaaatacgtttatttcacagtatctagtcaatatgatttgtcttagcgataatataattaatactaatctttctttgtataattttattactacctgtcaaaaattaaaaaatttagaacacttgcttgaagccacataatgaatataataattaaatagtaacctttctcctagggacagacaaaactagaacaaataacagtaaagaactgtattccaatagagtagaagagaaacatcctgtagaggggattattttgagtgagggttctaaagtgtggcgccacaggaactgaagctggggcaaggagaggcagcagtaagccactccagtaatcaaatacacagaatactgggtacattttaccattaatatctcatgaccaggatgtgaaagagaaagaggaagaggttacagttccacatcttctttgagggcttgctgtcacagaccgaaaatgtcccagtaggtcccaccttttgccatcacccttgaacagcatgaagagctgagggccaaacctttgacacatgggtcctaggggcacaattctaaacccaaactataacagcaatttttccattttatgccttttaaggatacacagtgaggttggggcaaacacaggggccagatcagggtgggccttggctgtctgttgctgtttcctctataaggcaaaatattgagcattcatcagtacagatgttacttctgagctgattttgaagtattgagtttcattctgtcattcctgatgttaattccttatcttgtgtttatcctaattcccttcatcattttatcctgcaaagtaagaaaaagttgaaaattcttttaaaagtttggtgagtgatacctgtttccccagggaatacttctgggattgcataggaaaacagaaccacagagcagcaggtccctcacctttcctctctctgggcacctccccagtgttcccagcaagagtcagggcagccattcactctctttaatgtggttggctcctccattctagcacacagtgcagaaattaagggtgcctggtctttccagctcatagtggcaattaaactcaagctcagagatcacaagaaacaaggcaaaagtcagggagattgtgattctttaaatgataaatgtcctccatagtctcatacatttgaatatttggccccatttggtgacattataggtggtttgggaggcgtggctttgttgaagtaagtatatgcctgtatttgagctttgagggtttgaaggctgatgggggatgcccttctgtatatatgtatctcttattggtcgatgaataaaacaccgtttggccaatagaggcatgaagataggtgggactaggagatgagaattctgcaaaaggtagatagagaggtgctgcaaagagacaccacgtagagcccaggaagataggatgtgccagacattctctggtaagataagaccatgcagaaatacatagattaatagttataggttaataatcagcgccatttgcagctcagtctctttgaggttcaagatgtgcgctctcggcttgctgttccagctacaatgcctgcctgctgccatgcttcccttctgtgacagaatattatccctctggaactgtgagccaaatgaacccttccttctagtagttgcctgagtcatgttgtttttaccacagcaaaagaaaaataactaacatagtgctcaagactggatggagaatgttttgaaatcgtgtctgaaggggtatagaattaaagctgagaaatgaatttgaggctaatttgggagaagcaggtgaaagagaaccacatgagaaaaggtatctggccatagaggtatgtttagatagtgcaagagatagggaggcccgatgtgaaaaacagtaagtgttaagtgggaagacggttggattccctgcaggggcagagggtgagtgcccagtgtgtgtttctgaggacaccctagtttgttaaaagagctgcatttgagcagtcaaagcaaagggagttttccttcagttcattgtagggtctatgtcatatggtagtcaaaagtctgtgtctagggtctattctgctaggctgaaatgtccaaggtggagagagtcatagcaaacctccgtttcctcggagtgatggatcagctgatagaaactaacttcgggggcaatggaagagggaagaactgttggagatttatctttacaaatgtacacaggcattttccacactggttgaggaggaagaaatgagaaagcatgtgggattcgggtgctgagtggggagtggcactgatttaaattgtgttcttttactagttctatgtatttttttacttttctccatctttcacaagacacaggagtctaggactcagcttttgtttctatcaactgagctgtacctgtctttgtactcaactctgggacaccatctccaaatccttttatttttctgctgttttgtttgtttgcttgtttgtttgtttaaagcagaatcctggttttactcaggatggcaatgacctccagtttaaatacttcacagttctaaatgatgggatacaaatgacattaattttaaattccttaaaattagactcagttgtctttttcttgctttggcctaacttcttgcctggaacatggctgtggacactttttgtagaagccatattaaggccacacgtatgtctgtttaagatgaattttgggtctttttaagactcaggaaggtcttgagctcctgatggtcttatagattcatggaacctgtctctgtcagctgttcttaacactaacaaaggctgttttcagctcaaatagtcccatactgttatgggactttgcaagaactctgcaaaagactttctttaatatttcatgtcatcacaaatttctaactgacctcagctaagtaagacatttaattaattagatttgctttcctttatgcctctgttcatggatggttattggagaccagcactgctgggactgtgcaactcctggaatcatcaaaacatatttttattatacttaggagaatattcttatttaggtggagacatgcataatatagcttagaaatatttttatagtatggaataaaaccatagtctcagatttcagttaatgagactattatcccctaagtattcatattagttaatattttcacatctaatactattagtaaatatttattttgtaagacaaggtctcgctatatagcttaggtcagccacaagttctttatgtagctcagactagtcctgaactccagatcacctcgcttgagcctctagaaggctgggctaccacatttaggatacatatataggtattgagatagggtctctctttgtagccgtggctgtcctggaactctctgtgtagcccagggtggcctggaactcacagagatcctcctgcctctgtttcttgagtgctgacattaaagggatgtgccttcatgcttggcttcatattgggtttttatgtttttttttaaactttttattgctgctttgtggattttacaccccacctatctccctgtccccttgcttctgtcctctgcccttgcaacctccatcccaaaacaaatttaaaagggaaaaccaaaaaccaaaaaagaaactaaaacaagcaaaaatactaaacaagcaaacaaacaaaaaacaaaaacaaaaaaatctcagcatggtagctgtcatgctccagtgagtgacacagtatatccctagtccatacaactttatttgtaaatgttcattgcaatgagtcatcattggtctggttcaaggcctctagcttctgctatatcctctgtactgggccctcactgggactcctcttggataccctatcgttgccttgtgtcatagagatcctgtagctttggatctgcaggtccagtcccttcatatgtccccgtcgttgacagatgaggtggatgttggggtgggctacctcgtggtcctgtttctgggcctgagtgttagctgggtttatcatctgtcagtttccatttttgtcactgtttaggttggctccccagtactgccctggctagctcacccaaatacagcagacagcagggagaagggagcagttctactctcacaccctcagtcccagcagtgttcagaccaccagagccagctctactcttttgcccaggcatggtgcagggcctactctctggattgctatcctttggtaaagggcagggccagctcttctgttctcatgtccctgaggtcagcgctcccacctattggagctggaaagggtgggtgggtctcctgctctcatgcccacaggcctggctcacctacatccccaggctaggtgccatgcctgctctcctgtgtactgcagctggtgaggggtgggccagctgtctcactctcatcacaccggaggcattttctctcagctgccacagctggcaaggggtgaggtgaggtagggcattttctatctcactcatgccaccatatggcagataaaggaggatagggtcagtcctcctgttctcaagcccccctgggacaacttacttgcactcccccgctatcctcatgccaacagggtcagctctattgtgctgcccaggtgaggtgcaaggcctgctctcctgactactgctgccagtgtggggtgtggggcagtgccagttttccctctctcatgaccccagggatagctctcctacccaccacaggttgtgaatatattagaaacatataaggatatattagaaataactagaagcaattagaaactatcatctgaaacagccaacatctagttcaagatagtaatccagagttgtacgtggagcattacaaatgaagtttgtgaaaattatggtaagctgtcaaaaggcaaattagatttcaaagacttcatgcaaagaacatagtaaaatgccccactccgtttccaatgtcctgacatgatggactgttacatggtactatggcctaaacagaccccttctccctgaagttgtttcttgttgagatactttatcacaataggaagtgaagctaaggaagagggtaacagagcttgctgaagaagcctgatgaccttagttgttatctgaaataccatggcatgaatttgcttgtgtgcatgcacatgtatcctcacacatgcagcctatacacacacacacacacacacacacacacacacacacacacatacacacacatataataaaataaacataaaaataactgcactatttgagtgatgatataatttttttggttatacacactcgtaaaattcaagaaattatataaagtacaagaaaggaaataagaaataatctaaactctttttactcaggtagacaaaatgaatgttaacatttggtgagtagcgttctaggtgtttctttatgcttatgtccagtagaagctgaacttgttggctagttggtcaatttaggcagacagatgatggggcatgtccttctgtatgctgtgaatatatgtttctcttattggttggtgaatcaatgctgattggccagtagccaggcaggaagtacaggtggggataccagactagtaaagctgggaagaggagcacacagagagagtccagagagagactccatgtagccacggaaggagtaacataacagagcattactggtaagccacaaccttgtggcaacacatagtttaatagaaatgggttaataattaagagagagctagctaataagaagcctgagccatcagccaaacagtttataattaatataagcctcagtgtatttatttaggacttaacaactgtgggatgaggtggaacagaaactccatcttcagacagaaagtccacagtttaaaaatcatcaaaatcaaatcatgttcttaacacatattactttgttactttgttaattattccatataattagtaaagctgtaattttattgcatgtaattaatttattgcatactaaaatattaaaagtggattagttcactttattatactaatttgaaattaaataaatttattgtattcctttattattatttgtgtatgtgtatgtgagcttgtgtctgggcacatacgcaacactgtacacatgtggagggcagaagacagcttgtaatagttgttttttttctcccccccatttgggtcctgggaatcaaaactgaggtcacaggcttgaccatgaacacacactgataggctgagtcacagtggcccttgcttcaagaactttaaataaaaggaattaattttaagaaatatttgcttgtgaaagtttatatgaaaatgaaggggcaaaatatgaaagatggcaagagtttatacgctgaaatttaggtagcatgtaaattagttataatttaaattaattaatttaaattaaccagttaatctgtcatgagagttgaagagtgttctaacactgtgttactcccacagtgtttttattttgtaaacattacattttttgagaatgcaattcctatgtgttagttcagtaattaagcaggttccgtggtacgtatggtctctctggttttaaattacttgttttgagtcaccatttggcagatgagttttattcctcctccagagagattatggatactacattcctcgaggtctttagtgtttgaaaatgtctgctgagtttttagttttagacaacaggcacaaagttatttcatgtttttatacacttggatcttttaaaataggtttctagcattttctagtacaagatggtgctgttgagagctagcttgattattttttcctatcctgtatatttcttgctaattgtttttcatatcaaatacctctagcagtctttttcatttcttaaaactcagtaactttactaggatcgatatcatagataattattctgtatgattttttttctgactgtgttatacatcctttgatgttaagattcagctttttcactggaaaatacatctgtccacctttcttctgtttacctatatactttttgttgcgttttcttaagtccattcttttgtcagaaaatgagtcacccttgttatctatgtgctctctccttagctgtcatctttctgattgcttgaataaattcttctgtgcatgttgttcatgattgcctcaagactttacttcatacaaatggtctgtctttagctctgtctgttctatctcggctgcttcataactcatcattagacctatgctggtggtgctttggcctcaatttatttctcagactcaacaatttctttttccatctcattcttctctttcagaatctttatgcctctgctccagtgattacaggtgcttgcttagatttcttacggtgaaaaggacttacttgtgttccaaagtgtgttttctttagttgatgcttctggagtcttacacatactctttcctggttccttttattgttgtaattattgtacccacttgtattgtgacatgtatggaagtctttgctgtaagaattcttttggatattttgctcattccttatgtagctattatttttacttagtgttgttcccacatggagtggttgaatgcttgttgatattcttccttgtttaatatcatttatttctcttcatttattatatgtttctttctgaagtccgagaagggctgggagaagggagtgcagttccctgcaaatgaagcccttattctgtgctttccttaaatgtcctggcccagcacatattccactaggcagaggacatatctactttctggaacttgacatatctcctgtgcagttttgagagatgacaagtgctggtggctgtcctcatgtctgctgagatatgtcaggacttctgcttttcactggtcgtcacctcttttctgtttgctgacttctcatgcctcagtttgattctctgtagacactctttaaacactttgtagacacacatatggaaagagaaagggaagagatggagggagataggggagaggaagagaatatgagactctcacagtgtgagtggaggtcagagggtaactttgcagagtgggtggcctcctgccttcatgtggattctggggattaaattcaggtcactaggcttgtgtagcaaatgcctttgtccactgagccaccttgccaccttgccaccttgctggccctattaaccacattttaaggaatttattcactcaccttttttttttttttaaaaaaagattttatttatttattatgcatacaacattctgcttccgtgtatatttgcatgccagaagagggcaccagatctcataatggatggttgtgagccaccatgtggtcgctgggaattgaactcaggacgtctggaagagcagtcagctctcttaaacctctgagccatctctccagccccacactcaccttcttttaacagtactgtttaacagtactttttctatggatgaggtggagttgggtaccatgttatcataacccagaattgtttccatccctaaaactttctgcttttaagcaaagttcctgcctgtcatcttttttgtttttcgttgtaaaagttttgactttccaatttagttttctctgatgaataaaaggcaaaatttttgagatgggaaaactcagtttactgtaagcaataacccagttgaaatgattaacatagttcaggggtcactactaatctacattactatccatccttatgagtttcttcagtgacctaaaaatcttttaatagttttcacacacacacacacacacacacacacacacacacacacacacacacacacacgtatatatacataacatatatatgaaaaatatagaattgactaaaatacagcaaaaataatgtcctcacataaagtacatttggaatccttgtctcttactgagtaggtagaaattaggttttggtttaggtccatcaatggaaaattgtgttcttagcttccattatcatatggggtgaaagttcaagctggctaccaattttctctacccagagcccacattcttggtccagttccttccccttgagtgttggtggacatgatctaaccagatgagccccttttcaacgactatctaaagcccagggagattcagagttctcacatggtgtatttcatgagtgctatagctgtaaggaggtgaatggtcagaaattttgtgtacttggtggacgacactgagctttgtagcacttcagtcctggccaacatgattgagcctggtgagaccctgggtagagaactcagctgacctgtgcccaggggactggcaagtattctggcagtgtttaaaacacttaacagtagtaatgtgttatgcagcaggagtaagctaatgccatatataaatcttaaacatgtttgtggaataaatgattggctttgttttcattcagtctgagtgtgtccataaggagaaacttttaattcttgttctatgacagttgattttatcggataggagagctttgctattctgtttccatatgtggccagattattcactgtccaccccccccgcccccactgtttttttctgcccaattcttttcctcaatattggtactcgaggaaaaaaatagagtgtttactgctctaaatcataattgcaactaggaaacaggggtggaatggctttttaaagaataatgggatatcatatcattctataatggctttatagaacaggttggcattcaggttaatttcacatggtagggttagctttttttttgttaaggaattttttttatttaaattagaaacagccaggtgttggtggtgcacgtctttaatcccagcactcaggaggcagaggcagatggatctctgtgagttcgaggccagcctggtctccagagttagtgccaggataggctccaaagctacacagagaaaccctgtctcaaaaaatcaaaacaaagaaaaattagaaacaagcttgttttatatgtcaatcctagttccctcaccctcccctcctcccctgccccccaccgacccactatcccatcccctttctgctctccagggagggtgaggccttccatgggagatcttcaaagtctgtcatatcatttggagcagggcctagaccttccccagtgtgtctaggttgagagcttatccctctatgtggagtgggctcccaaagtccattcatgtactagggatgaatactgatccactaccagaggccccagagattaaccagacctccaaactgacatccttgttcagggggtctggatcagtcctatgctggtttcccagaaatcagtctggggtccatgagctcctccttgttcaggtcagctgtttctgtgggttgctacagcctggtcttgacccctttgctcatcactcctccctttctgcaactggattccagagttcagttcagtgtttagttgtagtgtctgcttctgtttccatcagctactggatgaaggctctaggatggcatataaggtagtcatcaatctcattatcagagaagggcatttaaggtagcctctcgacattgcttagattgtcagttggggtcaaccttgtagatctctggacatttccctagtgccagatttctctttagatttataatggctccctctattatggtatctcttttattgctctcctctattctttccctgacttgatcttcttgctttcccatgtcctcctctcccctcctcttctccccttctctttcttctaactccctcttcctttcccccatgctcccaatttgctcaggagaccttgtccccttccccttctctgggtccatgcattcttctcttagagtcccccttgtttcctagttcctttggtgatgtggattgtaggctggtattcctttgctctgtgtctaaaatccataaatgagtgagtacataccatgtttgtctttttgtgactgggttacctcacttaggatggtttcttctagttccatccatttgcctgcaaatttcaagattccattgcttttttccactgagtagtactccattgtgtaaatgtaccccattttctctatccattcttcagttgaggggcatctaggttgcttccaggttctgtctattacaaacaatgctgctatgaacatggttgagcagatgtccttgttgtatgtatgtgcatcatttgggtatatgcccatgagaggaattgctggatcttgtggtagactgattcccattttcttgaggaattgccatactgatttccaaaatggctgtatgagtttgcactcccaccagcagtggaggagtgtttccctttctccacatcctctccagcataaactttcattggtgtttttgattttagccattctgacaggagtaagatggtacctcagagttgttttgatttgcatttccctgatggctaaggatgttgaacacttccttatgtgtctttcagccattttagattcctctaatgataattctctatttagttctgtaccccacttttgattggattatttggtgttttggtgtctagcttcttgagttctttgtatattttggaaatcagccctctgtcagatgtggggttggtgaatatcttttcccagtgtgtgggctgccgtttttgtctcattgactgtgtcttttgccttacagaggcttctcagttttaggaggtcccatttattaattgtcaatttcagtgtctatgttactggtattatgttcaggaagtggtctcctgtaccaatttgttccagggtacccccttctttctcttctaagaggttcagtgtgactggatttatgatgaagtctttgatccattttggacttaagttttgtacatggtgatacatatggatctatctgcagtcttctatatatcagcatccaagttatgtcagcaccatttgttgaagatgctttcttttttccattgtataattttagcttctgtgtcaaaaatcaggtgtttgtaggtgtgtgggtcaatatcagggtcttcaattcaattccgttggtctacctgtctatttttgtgccaataacatgctgttttcaggactatagctctataatagaccttgaagtcaggtatggtgatgcctctggaagttctgttattgtaaagggttgttttggctatcctgggtcttttgtttttccatataaagttgagaattgttcctttgaggtctgtgaagaattgtgctgggattttgatggggattgcattgaatatgtagtttgcttttggcaagattgccatttttactatgttgattctaactatccaatagcatgggagatcttggtatcttttctcgtatcttctttaatttctttctttaaagaaagaaatttcttgctatacaggtctttcacttgtttggttagcattactccaagatattttatgttgtttgtggctgttgtaaacggtgatgtttctctgatttctttctcagcctatttattatctgtatatagtagagcacataataattaaatccccaaacatgcagaataaataatattaagagcagctaaggaaaaggccaagtaacatataaaggcaaacctatcagaattacacctgacttctccatggaaactctgaaagccagaaagtcctggatagatattctacctacactaagagaccatggatgccagcccagactactatagccagcaaagctttcactcattacagatggagaaaacaagatattccatgacaaaaccagatttaagcaatacatatccactaatccagtcctacagaaagttctgtaatgaaaactccaacccaaggaagtcaactacaaccagaaaaacataggcaatagataatccctctttaccaacagccacaagaaaaaagggggtggaaatccacacaaaattccacaaccaccaacaaatccaaaacaaacaagaatgaacaatcaatgatcattactatccctcaatattaatggtcttaactcgcctataaaaagacagaggctaacagaatgcataggaagacagaatccatccttctgctgcatacaagaaacatcccttagcttcaaagacagatgatacctctggtggttgcaagcaggtccaatactctgatggctctcttcttcccgtgggtggagacaggactagtaccggaccttggcagtctctgggtggactggaccatgggattgggttccacagcgcattgtccccaagcctcacgcggctccctagtgtatttttttgttttgttttgttgtattttgttttccagatagggtttctctgtgtagctttggagcctatcctggcactggctctggagaccaggctggcctcaaactcacagagatccgcctgcctctgcctcccgagtgctgagattaaaggcgtgcgccaccaacgcctggctccctagtgtatttttaaaagtcacttttagttaaaaataagattatttacatgcattgagagcattgcacgcatcatagctgaacagcctatttaacttttaaaaagtgaacatgtgtatgtgctagtcctagataaagagataggacgttccagactgctgctttttctctaactcttacacattcataaactcttttgcttcagttaatcactattctctttatgccacctgacactaattttgcctgcttttaaggtgtgggttttcttttgtttcatgctgcactacctcagcattgtttgtgtttggggggggcaaaccttgatgggcaagctgtagatggttcattctcagtttgggaggaaaccttgatgggcaagctgtagatggtttgttgtcattgtctcagagactcccattctgtcagcatgctgcatccacaactccattgatgctgtactggaggaactgtgctcacttcaatcttgtagaatacgatggcttcatttggggccttcgttgattgtgcttctgtgaacaatcttatatgtgcatttgatatttttgataagtgtctttccttatccagaagaattgctggaccatagaatgtatactattaggttttataggggatgtaatcagatcaggaccaccaacggttttgcaaagtcactgcatcaagtgactgtcctccagtggtctataggaactgtagctgcttcataacagaacattatggattttaatcatcatcattatctttaatgcttttgatgggcaaaatatcttttatgttttatatgtttatatttccctcctgatgtgtgatggtaaacatctttccatatatttatagaacactattacttttccaaatttgtgccatttcattattggtgtatgagatcaattttgagcactaagttcagcatttaagagttgaggatgtagttcaatggcggagaactggctctcatgcataagactctgggtttgatcccaagcagtgcaaataggagaaagagaatcagcattaaaaatgtctgcattggggagatgccacagttgttaaagatctggtgtgtagacaagaggatctgatctctagcacccatgtaacaaaatcaggcatgattgcaagtatataaccctcatgctgatgaggctgagggaggcagaaccttttcaaattttgttggccaacccatctagccatttggtgaatgccgggctcagtgagatagcctgtgccaaaaaggtaaggttgagaatcatcagagagacacctgaaatccacctgtggcttccatatgcacttgtgcacatgtgtacacatatacacagtcacacaccacacacagagactcacacacacacagtcacacgccacacacagatactctctctctctctctctctctctctctctctctctctctcacacacacacacacacacacacacaacacacacaccacacacacacacacagacatagtcacacacccgcacagagacactcacagacacagtcacacacacagtcataaacacacacacacacacacacacacacacacacacacacacacacacacacaaagtctgaaataatataacatggatcagagaagaggagagagtacttgtaatagtagatattttttggagaattttatttcaatttcatatgtgcatatatacattctaattttaatttatatacataagtgtgtctattttatctcttaagagtggcagaaaggtttctaaatctttgttgtgttttacatacccaaacctctctaacttgagtaagacataaaagctaagacagtctcagttagctcagtccttggacagaatagctgagactagaagcaggattcgttgtggtttcatcagaccacactggaagctaagactgaacacaggaaatagaggtaaagtgcctgttaagtgacagatggagacacccagcagtgtctgtaatgaagacaccacacactcaaccccaagtacacagatgctcttgggcctccaaatctcctgggaagacaagggcagttttagaatcccatgtttagaagctgctcttgatgttgaccagtttggggagacctgtacagtggctggagctttcttcccatgagagaggaagtcggttgaaaaggctttctgggtgtatgaactttctttcagctgagcactcttaagaaccactgtactttagaataatcccacccatttcttttacccttgatatgattccacagcagtgaaacacatgagaagctctttaattaagggccattatctacatttctatacggctggaacaggaggcaagtggcggagttggtttgtttccagtcactctctgtgcagattatagctcctaatcctctttcctccagctcctacttgagtcagacacctaatgtgagttgcttatgtttctccattatacattactttggcatctatgtctccgagacgtactgtatttaacatttgtatgtagttgaaagttcatttctgaaggcttcataaggaccttggtttctaattaaatgttagcatgataaatattaactgtgcataattaaggaatattcagaattaatctatgatttttttctcctatttttttttcattctccatgttgaaggtaaaattcatcctatacaaggtttggggagaatgactgtataatttgaataaatacttccctgaatagcaatattactttatatagttaattataggattttaaatactcgtgagttccattgtgcaaatctgtgaatgtaataaaacacttttgacatgctaatcaaataaaacaatataagatttaattatccacttttaaaggattttatgtgctagattgtctctgctagagtcctccaggtaatttaggaatgttaaaatcctcttaaatattttattttgctcttaaagtgaaaaacagcaggtttatatgctcacttgaaaaaaatccttcaaggatgaacactgtaaagaaaaatttaaaaccattaaaatctgtgtatctcagataaaatttcctatcaacattttgctgtgcattcatgtggacatgctattatatatgcatggcaataaacatatacttaactgcacatgaaaagtcaaggtataatataataatctgttgcttatctatgagggctggatgctgttttctctgcattcttttgtgtttccatgtcatttaatacagatgtgcacactgccttttggataactgatgacatcacattctggtgtattagacacactatgatttagctaatctcttgtcaaagtgttaaatagcacctttcccctctcttttttgttaacatctttgtaaattagccgtttgggctttgcccaactatctcaagacaaattctcagtctggtctttgagccaaagggtaaacgatgacgcatgcaaactatcctccactctcccatctcagtcctccttatagcagagtaatggaatttcttgcttccctggttttccagatgcattttgccttacaccttgggaatggtcagagtatatgccatatgtcaaaaattgcttctatttgattacaaataaagctttacatatttgtatacataaataaacattggccactaatattttcctctttggtcagttacttcaataattttattggaatgataatcttttgttcaccagtaagagttctaagaatagtgagatatttccatttgaattctattttttgactattatttatttataaaactgtttttatttctgtgagaatttcacactgtattttaattttattcaccctcaacttctccctttaactcccccattggaaagtaattggtccccaataatctcatagggagtaccactattaggaagtgtggctttgttggagtaggtatggccttgttggaggaagtgtgtcactgtggggggtgggctttgaagtttcctatgctccagattctgccaagtgtctcagtcgacattctgtttcctggaagatgtaggactctcagctatctctccagcacattgtctgtctgcacaatgccttattccccaccataatgataatggactgaacctctgaaactgtaagtgagccactccaattaaatgttttctttataagagttgccatagtcatggtgtctcttcacagcaatgaaaaccctaaacaagacaatccccatctccctatcttcaagcttcctgtttacttaaaagtatttaataacccatttactccaatatgtgctgttcatattcttctgagtgtagggccatccactggaacgtggtcaacataccaggacatatatccttaaagaaaattggttctcccttccccagaagcgattagctgcccaaagcgctttagttatggatgggggctcacaaacgccttcctactccatgcttgaatgttaactggcttaatctcgttcaggtcttatgcaggcaacaagagctgtcgtgacctcataagcagtggctctgacatgtccagagtacactggtttgttctggttcttccttacttctggcttttacaacctacccagtcccttagccttggagagggaatgatatagaagtcccacttgtggttatgactccacagtcacttatttgtgcaccttgacaaattctatgttaattgttgggcactgcacaatgaaactcctctagtgaagtctgagagctgcacttaccctggctcaggactcatctgtcccctgggtctctagcaagttctggagctgctgggaggtgtttgttatttgattttaattgttcctgtagggattttaaaatttaagtaaatgccatttgtttttcaaggtttacattttatttatttgtgtgatgtgtgatgtgtgtgtgatgtgtgatttgtgtactgcacacgtacatgcaggtgcccatgaatgccagaggagggcgtgatatcccctggaggtgggctacaggtagttgtgagccacctgccacaacccaaatttgggtcctctgcaagagcaacaagtgctcttagtctctttgtcatctcaccagtcatcatcatttaaaataaaacatataaatgtatgatttatagttcaatattttgtcctataggtaagagtactccatcacgaagtattggaggaatccctatattttctcattatagtcttaaggtttaattttttgatatggtaatatttgacccatctgagatctgtatttaataaggttaaagagaagaggcaagggttgttttaaccctgcttgcccgtgagttgacagaatgcatgcctatttagccttttattactgatgtaaaatggctcattttacaccccccatacagttgaaccaatttatcaacatatcacacctcctcttagccacaaagtccaagaagtagtgactcatgggatctattgtgttgtagtttttagtttctgtgtggttgggaattgagttcaagaccttgctcatgctaaacaagaattctgccatctagccaaagctcagcacatcacccatactcattttgcataagaacaatttttctctgtggcttttatactggcttccatgagatagcgatcactttgctattccttttcaggttacgcgtccatttttacacactgactcaagctgtgaagtcctggaatgttactcaactggggctggatgatatttttaaggattataaatattaaaggaaaattggcactttcgtagtactaggtactctcattaaagacaaaaagtatgtttcttgatggatttaagtgttcttttatgcgtttcaataacatttaaaatttcttcatgtaggtcttgaccatttttaaggctttttagtaatatttaaagtctttggttgttgaagaacttaatctctttcataacatttatatttaaattaaccaaatataagcttttggcttttgtttatttgtcttatatgcagacactttagggaacacttggcatgtgtatgccatctttcagttgattttaactttctaaagcctcactaaatggaatctggctggggaacctctttattgtagggtgtgacttaaaagaattcagtcaaagcatgacagtgtttatagaatataatttgtacactgtagctagcctttctctgttccaccagcccgctcccaaatcatgacacaaagatttattattaatcttatgaaagcttggctgatagcttaggcttgtttctaacttgctcttataacttaaattaacccatattttaaaatcgacattcttttacatagcttggttacctttatgttgtaatgcccatgctgcttgctctgtgtcctctggcatctcccccttcttcccagcatcctctctgccatgaaaatcccacccagctattggccgttcatctttttattacaccaatctgagtgacacaactccacagtgtacagaaagattattccataacagtacaccgagggcagactatggtctggctgccattcctgaaatatgttaggtaagtgggctaacatgtgtgggcaggcactcttatgagattgcccagagttgggagatatcatttaatatgccgttggttaatctctgatgtcaactatttgtgaattctgtattatttatggagacaggagaaaggctgaattttcaattgagcttgaagcatacatagtcccttgttctggtggcaagggacatgtgaagagaagtacattaaattgcctttaagtagatggttaagaatttgtgaattcagggactgttaactttttgttttgcagccatccaaataaaatataacttcttgccctgagcaattctactgtctccttggaatttacccatttcatccaccaactcatttatacccctttaccccataaataggtgtaaggtggtgtctcagtgccacctggtggtcacctggggaaccatgtgaactatccccagttcccttagttcttggtgaactagagattgtattggttggttaaattaaaggcaggcccataaccacatttagtggaggaactacattcagacttatggcaagatcagtttaatcatgaggtcccatcagtgccaatgtatttttttttggggggtcatttttatttaaactttttccagatatttgtttttgtagcttgctgctgagacagttctacataaaacaaataaatcctttctcatattttctttttctttatattttcctttcccccggattctttcttcctggctcattttcctttctcctttcttttctgaatttattcctctggttttttcttttctcagagtacagtattttattacagatcttgattttcctttagaactattgtatagttatttttgtaatctaaatgcagaaacagtctagaaccagaagcattttctacagaggctatcaaataggtaagtacacatgtatgtaactacacaaaagaacaatgggaataggaatatatgagatagattgtcaaaaaaatatctctttctcataaaacttctcaggagctgtttggtaactacagtcctaaagtgttaaatcagacaggatgtgccagcaagaagcaaattatgacatggtgtgtctgtcatccttggttgaccattatagaagagaggagacaatacacaggaggttcacttttttaatacaatttttaaatttaaattagaaacaatcttcttttacgtgtcaattccagttccctctccctcccctcttcccctgctccccacataccccctatctcatcccctttctgctccccagggagggtgaggccttccatgggggaatctttaaagtctgtcacatcatttggaatagggcctaggccttcccccgtgtgtctaggctgagagagtatccttctatgtggaatgggctccaaaagtccatttttacactagggataaatactgatccactaccagaggccccatagactgtccaggcttcctaactgacacccatgttcagggggtctgggtctgtcctatgctggtttctcagttataggtctggggtccatgagttcccccttgttcaggtcaggtgggtttctccagcctggtcttgtcccctttgctcaacactacaggaggttcacttaaatttgaatttcagataaacattgttgtagtttgagtatgaaatgtcccccacaggttcatgtgtcatgtgcttattcgccagaaggtggcactgtttcaagaagttcttgaaacttcaggaggtgggacctagtttgaggaactagatcattggaacatgcttttgaaggttgtacctagtctcctgtcacttccctgttactcttcttcttggctcacgtgaagggaatagttccaacctctattgtacttttttctttctaaacaagttctttaagaacttcatacaatggattttatcatgctcaccccgttacccagctccttccagatctacccctttcctacccagtcaacattgtgtcccctttttacttttaacccatggagtctgaattgtgctgcctatatattcttgtctatgtggacttcctctgggtcatggttgatctactagatagaggtatttagaaaactgactctccctctctcagcagctgccaattgccaatagctctttagctaggagtggagctatctgagcacctccctacagccctagtgagaatttgtctggctggagcttgcacagatcctttgcatactatcacaactgttgtgagctcatatatggcaacatccttctaattccagaagaccaccaatggcttcaaatcttcctgctccctcttctttaatgatccccataatagcagactctctgctaaggcctatctagccacaagttcttggccctaataattatgccaggtatgcgttttaactggtggaactggcactgagtataatcagaagttgattggttactcccatgacgtacatgccacatgttttatccagactagtcgttaatatggttctttaaagcttatagatgggtatgattgatggttatcccccccttttggtagtgtgcataataccctcaacactatgaaagctagccagtaggcatgaagctttcagatgagtacctgcttgatttatccacattgttgttattctttatttcttaggaaaaccatcctttgtctttttttaatcttttggggagccaaaacatggttctaacttcagttgataagcctgtggttgtggcgaattcttactatgaattggagaggcaaagcttgtgaatacctaagtccccggaaggcacagaaaatcccttttttacttattgtggctacagccttccctttgctcttcataattttacttggtgctgctttcaaaacattttgtctatttgatttattgctatatactcaatatttaagtcagtgcctggaatataggaacagctccattaatatggtcaagcctttgtattgtgatctctccatcagtagacgaagccaaccacagattacatgctgaatggttaggcctaaaaaaactgtatctttcctgacaagtacagactggcctttttgccagtattcccaatacactatggcaactatctacagttgtttatatccaactaggtattataagtcatctagacatgatttgagtctctctctctgtgtaagtagattatgtgatattcacttaggggatttgaacaattttggtttctggggaccttagagccaatttcagaaactctcatgcttattgaaggaatgaagagctagatattcatggtgagtaagcaaatctgacttgtttatttttactgtatctctgttttgcaaacaatgtagaaatgctaattttcatcaaaaaagagcataaccttgaacttctgtgggataactttaagcatcaggggtgttagcaggtttgttttgttttgttttctaccaactgagaaatttcagaaaaggagctgttggttggtaagctgacaaccctttcttacatacttttgtagtggatcttccgtacacataacaggagcaaaacaccactagaatgacaagcttttctcaagaccattaaatatatagggaacaattccaaacatttacaagtattaagcctttagtcaaacatctcaccgcgcatgttttgtctgtctgccttgtcccttcggcattgtaaatccctggtaaaagaaacgcagacctattcattatctctctagaagcaaacagagggaacactgcctcagccttctgagaactatccctttcttgtggatcatctcagactggagcacacggcaaactgcttttaatttcaaatattgttcctctgatgccatcgttttgtgagaattttatggggataacaaaataatcacttcctactcctgctttcatttccaaattctgagagtcctcaaatggctcacaaatcggcaatcttaaggggatacccctgctctgctgcaaaggggacattggaaagatttaaaagctggccagaattaagactgtagagatgagggggcctatagtatcagcctgactgacctttactgagctgggaagatgtttgcacatgaggagtgatgtcttaaccgtgcctagtttgaatggtgagagtttgatggggagagtgcaggcatttcatctttatctccctggctgcataggtggtcaaaacctacaaggtgtaagtaaaacatgggctaactctaccaaacggtatttgaaacttggcagtacctccgtccgactgaatgacctggaataaaacaggtagggtacgagagagctccactttacctttctgcaaaatgcaagtaatggtcccactgggctgttgtgaggattgctaccagggcctggctggtagcacttcccgggtggccagtgatgattgtattcagttcttatctttccatctctccgctaggtaccttgggatcacgagacccctcacataccctgtgaggcagaatggcaggtgcatggccaaaatgattctgtcggtctggcttctctcagcttccatcaccttacctccgctcttcggatgggctcagaatgtaaacgatgacaaagtgtgcttgatcagccaggattttggctacacgatctactccaccgccgtggcgttttatatccccatgtcggtcatgctgttcatgtactatcagatttacaaggccgccaggaagagcgcggccaaacacaagttcccaggcttcccgcgctcgcagccggagagctccatctccctgaatggtgtggtgaagctccagaaggaggtggaagagtgcgcaaacctttcgagactgctcaaacacgaaaggaaaaacatctccatcttcaagagggaacagaaagcagccaccaccttggggatcatcgtgggagccttcacagtgtgctggctgccgtttttcctcttgtccacagcaaggccctttatctgtggcaccgcctgcagctgcatcccgctgtgggtagagaggacatgtctgtggctgggctatgcaaactctctcattaacccttttatatatgccttcttcaaccgggacctgaggaccacctaccgcagcctactccagtgccagtacaggaatatcaaccggaagctctctgcagcaggcatgcacgaggccctgaaacttgctgagaggcctgagaaatccgagtttgtgctgtaaggtcatttgtcactaccatcctttatgtccccccaccccttttcgtgcagcttcttgaatgttggggaaagctccctgaatcagtggttagcttattttctaccagagaaaggtgtgaattcggaatacctccattcactcacattgaggttaaaaacaaaacaaaacaaaacaaaacaaaaaacaaaaaaacaacaataaaaaaacccaagataggtaggtatttgaaagggaagggcagattggttgtccgatgtatttcagttcgtatgactggcggtggcccggaagatgatgttctccatttctttcatcataaatgacagctaacgtttgtccatccctgtatccgaattcctatgatattagcattttaattgcctttgtacttccatgtggcgaaacggtttttttttttttttgttttgttttgttttgttttgttttgttttgtttttgtgatctcatagttcccagagaatcgcgtcttttgaggaagaaatgcctcttttggtttttctggtttggaactacatccatatataggagatggcatgctgggacaagacagggtagtgcttcctgtcttggtatccaggaacttaattcctgtcatagctgtccagtttttgacattgtctggaagatgttcctgacactccaagggataatgggagttgagatctgaaaatgtactacaaagggctgatggtgataaggacttgggagttttataagtaactcacatactacaagtaactcacctattgctgcagaggtgaaaggcagatgaacagataaaatgaagacttttttatttttaagaaaaggttatgtagaggggattcgatggatgaaatcatagaaagttctggtggaggagatgtccttgtgcactgaggaatgggagtaggaaagaatagagcagagaaggttggagggaagctttatcttggagggaccttccctgtcagcttgcctgggcaagtggcgtgtcttataattatgtcccaactgagtctatatcccacataatctcaatcctaggaccaacgtctttcaaatactagagagcatttgtcttagaatgggaagttgggagagtatagcagttccggttcttgaactggggttagtatcactgtgttcacttctacttcaaatgtgtgtattctgttgtacatttgaaatcattcacaatacaaaaggcagcatttaaaacaattagcatgtgacatcagcttctagaacactcagtgtaagcaaccccccccccaggatctttcaaatctagatgaccccactgaatgagtattcctcttctcctccaccccccggccgccccactttgaaattcttaaggaaggagctatgttttagattttagtttgcataatctatgccagtgcttgacagttgtagaataccaatggcaggagctctcctgctacccagttctcaggggattaatttgtggctctgagtaattgatataggataattgacttatgatcacatagatgtggaatgaataatctcagggcatgtgcccttaatcatcatgtaattccacttgtcagatgaatttagtctgagatagtggagaactactgaatactggagctatgtgtgctatgtgtgggctatgtgtgctatgaagacacctaggatgctgtctttactctaaatgagccaagtttgttagacatgctgtacggtaggagggtcccatctggacagaatcctagttatttctcaaatacaggaaataaagccaggccattgataagagttggactggatgttgttaaggtgaactgatgaaaactatagatttctggataaaatagctttgtattagtgagtaggggaaagtgagggagtagatgagtaactcatttttgttggtgtacttctgaatcccttggaagcagttatttcttggtacaagtagttaggttattttgcctggcaccaggattgtttggccagaaagaggagagtgtgttggtttcatttcttaggagtaactcaatgtggattatgtttgaggaaaacctttggaaatggtgtggagggcagatgacaggagggctcgttcagtagccagtatgcaaactaggagagtgctgatgatgtcctaatcatagctttatttgatatctctggagacttgaggataattttactgattagtctatctaataaactcgcagatatttcaggtataagaatagtaattttaaaaacatgatgcaaacaggtttccctgtttgaaataataatagcacacattgactaaggttctattctcagccactacactgagaactccgtgggattaatactatggaaacttcaaaactttacaatgagctagttttctccatttccattttgaagatgataaaacaagagcttggtgagatcaagtcatttccccacggtccttcagatgagattgatagagttggatttcagcccaggaagcctgtgttcagaagtgcttttagtttcatgctactgtaccctttacaaaaataaatttgctcaaataaagcacaaggatgcttgcctgtctgtccttagatagtgtggaggcttgggtgttgtttcctgttagtcccagacaagggccagcagacttatatggtgagggaccaaacagttttttaagcgtttgaaagccatatggttctgttgaaactactcatctttgctactgtcatccatttaagtaaacaagaggacatgggtatgtaccaacaaaacttaatttacggaagagatggccagctggatttggcccacaagcactagtctgttgtcccttgatttaagagagaattactgtgcctaattacatctctctcagtttgaatttataaccatgttagatatgcaaataagataagatggttggcctaaaaatatccatcaactttaggatgtatttactgttagaactattgtatgctcatatagcagccatttttgaactctataccaggtagttttgttatcagcaccaatgtgagaatattcattttcagttttttttgatgcctggtacacactatggtagatacataaaatgtgacatcattgttgctgttgttcatgtatttctatagaaagtatatacatatagaattccagaaacatatactttgtgaccatatacaagtccagaaacatacttttgtgatctgaatgtttgtgtttccccccaaatttatatgtcgaaatatagactcaaatgcagccatatcaaaaggtggggactgtatgactagagtgactagtgactctagtgactaggtcatgagggcccttataaaagggaacagagggaattggcttatgaaggagacagagagtctcacagatgcaaatttactggttcaacagctatggactttctagtttccaggaataagggacattctcataaactatcactttatgatatttcattataatggccagaatctaccacagcacatgcacactcagctttgttgtataatgatgaaagtcacaggcagaagccatgtcactcaatggagaagaaagtaacttagcaagtgcttacatgaatcctatcagataagacttcctaacaggcgaatctttgaggctatttaatgcatttataattaacagtgaacagagaagcactccaggtaaaagggacatttgtgtagagtcactaatgtaggagctaatgcaaaggacagaccagccagagcagagatcttgacaaatttccagagtgagaaaacagttggagatcagagtagaaatgtcatagaaattgttactaatgatttatgccagccccaaggatttggactttaagcataggcaacagattctcaattcagaggaattgttacctcttctcctgggaatgattggcaatgtctggagatatttttggttgtcattactggagtatgcctggatgtgaactgtcgtctcctaggtttaggtcagggaagttgccagctatcctacaatgtgtacaaaagcctccagcagaaaagaagtttggaagctctgacgttgatgtagtaagtcattcatctcttctgtagctagtggacagagccatcaaaataggggcactggttcagtgacactgtgtaggaagacacagaaggtagagttccttcactggtattacccgaaacactgagtggctttctgtgtatgagatacagcaccaggcatggcatgggtagaaagattgtgtaacagtgttcacctctggaagttgacactcctgtcagtttaagtgcccttgaggttagtgacacttgagtgtaaaagacatcttcgaccaaagttagaacttgcctggttcacactgcacagttacattcaagcaaacactaattggaaagctgctaattgatttgatgtgacatatgttgcttttaagtctcatgtttttctaacttgtttgatattattatcttgggtgacatgtctgaatgatgatgtaatcagtcattgtggtctccagaagagtgacaaaagacatgcaacccacagctcagagcaatggagagatcttagactcctcccactttttcagcttcctcacacatctggtggcccacctgaggactttgggaaattccctataacttctcctgccttttgcttcctatctggctggttgggtttgggtgtgtgttatttggcttcttgcttggtcttcttgactccattatgttttctcctacacctcagtttccttctttctctgtgtgatcaatctagactgtatgttgtcacttccaaatatttacccatctcttcccattttcttaattagcaaaaccagagccttaggagtccatcaggcactcgagaattttccttggggtaacggagtgaatacaggggaaaaggctgtgaatactgttgcactggtaattttaattcactactatcattttaatcttttcactatttcacaagtttgtaaataaaggcaatgacaaaatgtaacaatgtgacttgacacaagcaaggatcttctctttctctttaatgaatgattctgctcatgaacttgaactgccacaaattgcttttaagtatcatgtccacaaggaccatgttctttggcaacatttatgagcagtactgaaaaggagtttctaaaatactttgctctaaaagaatatcatggaattgttttgaagcagctgttcctttccatctcctctcttctccttggtgatggtattgtcttcctcttcaaaggacctcttctaatcccccatcaattgcagtgggtcttagcagtgactcatcgcagaataaccttgggtttctgccatgaattctgtcaatttgctgctccaggctttaggctgcagctttggaattcaaccttattgcatgctttctttgtagaaaggggtaatttaaaagaaatgaagtaaattacatcccaggggaaactggaaagaaacatcaaggcccctgcaaccctgggtgtctgtgatgggaccctgtcttaatgacagaagcaaaaaaagagtttgctattccctggacatacacctcacagtgacattttcttcacataacatgtcccattgcctgaagttcaagttcagtgctttgcctttattcaataatcaactagtaatgacaatagtgtcttcgttccatgttttacagttatccagagtttaattatcttaaagcaggaagggtgttggtctatgtagtgttttatgtaatgctgaggatcaaagtcaggagcctcaacatgctacacactcacccactgagcccttgctctgtcctcttccaccacgttcttttgtgtttgtttttctttagctggtaacaaatacaagtagcacaatgtaaaatcaaacagcacagaaaagtatacagtaaaaacaaggcttgaggggtgttcttaggaagattatttacatgtcaagatcatgaaagaagtgatatcaaggtggtagggtttaataagaagagatgtagggggagggcttgggataggagttgctcagtgctgaaggccaggccagtccagtgacagctggaggccaagggacctggaacatgtcttcagtgatatcagaaagttgagtgagttggggcgattccagggagccaggtaggtttttgacaggagtgatcctgggctatagtgggcgtggtggacagagggcctagcaatagcagaaggagtgtgtgttataaagctaatgaagatgggaggtctctgccctgggggagactctaccaggaagatagcattgattctaggagagaagctaatggtatccgagcagtctgggacctggaatcgctaaatcatccctctggctagcaggtgggtggtgaggaaagatgagctcaggagatggtgctggacagggggaattcagtagagtttaggaactggcgggggcaaaactgagttagaggatgttgagtatgttccttccacttggtgggaagagcctagggtcccaggctagaattgtatccagagcttcattagttgaggacacagttgttttctttctccactccagcccatgaaatttggacttggttgaaatacagcaatttttcccagatagtactgtgtgaggttgagggtcgaagccagagattgtgacttatggagaagtggattctatcagcaggaaaattcaaccatcgccacacttacatgagagactgggctgagaagggaagttcagataaatggattcagatataggggcagtgtaagagggacaggaggctaaactgaagcaaagtcctgggcttgtgaccttgaccagctcctaaacggagtgtttttgtggtaagtcaaggcctgtgaaaatatggcattgtgggagtgtgggtctatcttaggggaatggatactgtctcagttgttggcttaaacttttctatggcctgtctagaagacaggccgggagggagcaggattctggtttctgggaaggtcagttcctaggccatatctttctaagtttgaagtgggtgatgattttcagtggaagtaatgtgtgtgtgtgtgtgtgtgtgtgtgtgtgtgtgtgtgtgtgtgtgtgtgggtgtgggtgtgtgtgggtgggtgtgtgtgggtgtgagtgtgtgtgggtgtgagtgtgtgtaagagagaagggggagacagacagagaaagtactctgtactttgatcattcttattctttcttgaccctctttggctaaatgcatctttcttttcaaacccccatgaacccactttcatatttgttttgtgtgtgtgtgtgtgtgtgtgacccactgcatttaattggtgttgctttattgagcattggtgaggggatatttccgttagaaagggctactttccagtggctatgcaacttctcccccagcaaccattaaaccttataagtccctccccactcctgatgggatgttaatggacccagtcttgtgcaggtgactgccacttctgggagtttatgaatgcagtagccatgccatgtccagaggatgcgtttcatagccacttcccccatcttcctgcttttatattccctctttctcttattctttcctgttcctcgagcttagaaagagtgatataggtgtatcacttagggctgggcattcagtgaccagttattcccagcactttgactgatcgagtctctaaccattgttctcccagaaaacagaagtttttctgacccaggctgagagtagccatgaccttttgatcaggtttacaggaatgaattccctcctgtagagcaaatctaatcagagggtgtttggttagctccatagccatcatgccactgtatcaccagctggcacatctagtttggtaggtggatactgtagaatgaaggatttataagtaggcaagactgttgatgacttttcttcaccatcagactgtgttgtatcttttggcagtatgaaagctagccatccaaaaggaatttttcaggtcagttcctttttcatttcaaccaaagtatgtggtgtcttccgcacagtcttatcacctagctttgggaagcaaccacggaaatggcagtagtctgaattgcttggtgtctctcaggcttcccaacccaaacctcacagagatgtaccctacattggcactgggattttcatttaataatttacagcttcttggagcagctatctacacctatgcagcatacctttcttcaaactcttttttttaaaattgtattttaattagcttacaaaatagatttcagtgtggcttttaaatacatctttcgtttgggtttagcctccctacactccttcctcccccattccacctcatccttacttaatctttccagccttgataatgcctcctctatttttcatactcattattctttgagcagtcgttattttcaagtagggggaaggttatactatattgtaaagattttaagttctttttgaaagcaaagccatttttggatacatctatattataaaagatttctaaatgcttatttggggctcattctcaaatatatgactatgggcttggtaacttacccaacttttgacacattacattttcttccccattagagaggctcatgaaaccttacaagtccccaatggttgaaatcactgactgccataataaagaaaaacaaaatccacccaccacaatataaaacccacacttatggtctacctaattttcttgtctttgtctcttttatagacaaaactctgaccactgtagagataaaggtcacgatacatgatccagagtggaatgcaggagatgaaatagtgcaaaacagatggaaacaacgaaaccattggctgagacttcaaaatggaacatggcttctgtcttcttggcatggctgaaatataacagggggtgatctgttgtacaaagtgtattttgggggagatggcgacttcttcctttttcccctgtggatctgtgatattgtgtttaaatgaaaatagctctcagtgtcagacagctatctcagcagtaagcacactaacagagctgggttcctcgagggaagcagtttctggtgctttccacaagtccacattcatgtgagtaggggaaactcctaatgcacaactcccatgcttccagtgtaggcttcgtggtcacttttcgggagtccttcacgagacagtgcaattctggggtgtgatagaagggtgtctttgcaagcaaactgcagtaagcatagtgctgaatgtgttgcatgtccatgttagaaaacagaaacctgtcatcagctaatacaagtgattccccagagcagtgtctgtccaaagcttttgtcaaatactttggcttttctgcagggtccctgtgacttcctaccagtgtccatccactgttaaatcccctatcattgtggtgtaactcaggaacagatctcaggatggaaagaggcaggaaaccggaagaaagctttttcttgggctcacactcctgaaggcttctgagagaggatggtaactggagaagagtgagcgccacctatctgcattgtatattaacatgattcttggcatgttgtttactctcatcttctacaagggtgcaaggagcccacagggccgttctataactgtgtgttctgaggaaggagtttggcaatagcatatccatgaatgttggcggtgcttccggagacagcgtaaatatgttcatccaactggactgtgtgaatcgaaggtcacctggacccctgttgtgaatactctagaacaccattctgtttcatgtagagaatttgtctctgtgttctctgtatcttaaatcaaatgtgtgcctgatgaattctgtcctcttacaccctgccctcaataaaaatggtcaacatcaggacaggtaaggagacagaatggttcttttgtggataggaccctttaaatggtactatgtagtgctgtggctgaaggagatggaagggcatagatcagagagtaaccatgtctacaaggggggaatgaatgcaaacctttatctgataaaagaactgaaagagaattattattttcctacaactaaggaggctgtcctctcacaggataaatgaattccaacatggattatggacttcttccagctgtcactgacgacgtttattatgagacacagggaagggcccctttcctgtgaaggagaaataggcaccgtcctttcaaagtgtgtacaagtttctgagccgcagatttgctagagtgaccgtatatacctatattcataatttaaataacaattatgtcagatacatgttgttaaatttgaaaatgttttattacattacatcaaataaaggttatttgtagctgtaataaagaaacataagcaattgtttttaataaaaggtctgatgtcatacatgttactctacaaaggatggtagggggcatactcggtgctggtgcttgctaaaaccctaacagctacctgggagtggtggcgcacacctgttaccttaacacgcaggaagcggaggcgggagaacagtctgaagatagtataagtttacatctggcgacactgtctaaaaacagtaacaacaacaacaacaaaaacaaaacctaacaattaattgacagctttgcaataaattaaattccaatgtagaaatttatccatttagtagcttttaaattttaaattaaagggtgtttgtttcatgatttgataaatactgggctcttgctcccatcaggattggcagtactgagaagacaaagatgggagtggtatagtccttactctgaaggaatttgtcatcaggatgttagcagccatttatcaggtcatcagtgcagaacacaacactgtaacaggttgccaagagggatggtttactttctttcagggccttgtggctagttagtgggatcaatttagactttgtatttgtttaattttcttattgcaaccttcactattcaaaccagctccttatcctgcctgatcttaataaccaagtgttgaactctgtctcattgcagcttcaggggttggggctggatcccatttatgcattgcactttagatgcatggcaggcaaatggaaggaaaacgtagcaattgaaagggagaacatgtctaataattaatctttcctgtatgatgtaaattgtctctgccaaaggcacaacttttgttttaactaagaactgagagaaatgattgaggtaaacattttccacatggtttatggctgtttgagcaagaatgagtgtgaggattaatctcttttcttactttgggggatgagctgtcatcttctggcaaggctgagcattgggaagccatgtttgggaagcgaagtacttgtaagagacaccgagtcacaattgcctctgtgtttagttttagtcagtaaatatggaacctggtactcaggcttctcctgggtttgttggaaactagctcagacataagttgatcaagcacttacaaggtgccttgtccatgagatgcctgtgtatgtatttgataatcatattttcatatagttttattaggctgattgtgggcatgagctcaccaatctgagttagaaatttacatcatttttttcaaatagtttgtgcaaatataataactgtttgaattcccacctggggatggcagaaattttcctttcagcattttaattattaaccaagttctcagtggaatggatacagatgtttgcaagccttgaattattttaaacagtagatgatttttttttttcatgtcaggacctttatgcatggtcttcccctctgcccgggatattcttcttattttccattattcacttgtcatgtgtcttcatcaccaatatgctgatttgaatgaaaatggaccccttaagctcatagggagtggcactattaggaagtgtggcctttttggaggaagtgtgtcattgggggtgggccttgaggtttcaaatgctcaaaacaggcccagggtctctggtcctgcctcttagctccttctctagcaccgtgtgtgcctgtgtgctgcaaagctccctgccaccgtgatgataatggactaaccctctgaactgtaagccagccccaatgaaacgcctttcgttatgagttgctgtggtcatggtgtctttgccttgcaacagaacactaagacagccaatatgccccttttattgagcaacatggtgggaacatatacatggtagacatgtactgtatgtttcttgttaggaagggagaaaagtaggaaggggggaggaagagggaagggaagagggggaggactagagttgatttggcacttttaattatttttacaagaagaagtgaggagactttcaatgctgtggcctgcccaatgaggagcagggaaggaaatgctgctgagtcttctgtgtacatctcagggcagagctactgcccagggccacttgtttttcatgacttactcatatcacgagagtgaccttctctcaattttctgcactggtggagcagagctgtgtatgtgctatggcccatatgttgaagcttgtttatctacagctagccagatggtctttaacagtatacatagcagccatttggaaacttccagtgggtcagcgcattttgaaaacaccccagcaatgcatatcatgatgctgttacttgctccaagcttagagtgagaaactccctgttcaacattatgtgtaaatattcagcctttgagagccagctcagggtgtctagttcccacagactgggatttatttaactggtggctctttaaattggaattgtctaaatgttagagggaaaagagtttgcttgtttctttccttttttttctttcttgtggtactagaaaagcatgatactttccctgaacatccatccctaaaaacaatttctggggctcagtgtctgagagagcttactgcccttgtggagtatagtgagatatccaccccactcacacctgtagcactgaccacacccatttgggtgtggtcacaggtgcagacatgatggagtgtaggcctagatctggggtccccgaccccagtgctctctcttgcttctggcaggtcacagaagagcatctctctcttgcttctgggtgggtcacagaagagcagcctgtgcagatccttagagcggaaacctgcggtggccatctgtttcttctgtaagtgacttctccctgaaaaaaattatatttaatattaatacctagtgccgtgaatcattatccatgccactgcaggggaagacccaggttccattcccagtaccctcatgacagcttatacaacattctttaattatagttctaggggatttaatgccctcttctggcccttgagggcactgcatgaatatggtgcacatacatacatacatacatacaaacatacatacatacaaacatacatacatacactcatacatacacataaaataaaaataaacaaatctttaaaaagaatcgattcacaaatatcatgaggaaacttggataaagttccagttgggttacaacttcacataaaataaaaataaataaatctttaaaaagaatcgattcacaaatatcatgaggaaacttggataaagttccagttgggttacaacttttaaaatgtgcagctaacagacgtgatgtgatcatctacataaacataaatgaagtgtgcagtatgtctggtgggaactggaaagagacataggtgtcaggtgtcagaagtaggtttggagatcaaagttatgttataaaggaatcacacctgcactatggagggaaagaacaggtggtaaggaagtatctttgatgtgtattatggaatacttttggtgccaaattatccttcttaattatatcttgattaggctattattgaaatactctttattccatgaatcctcacggttttgcagtagcagaggaaaacagctatagatctgagtcttggattattcaccaaggtgagtcatacacctgtaggaaaattactagatattatagccacagagaatcacagagctgaagactctgctggttggtctgattctacctgcagtctgtagtaagggagagactgttttccaggagccatgttttgtctgaatttgtttaaaggagaatcacatataccatcactttgccaactgtctttgatgaagtgttatgtagttttttggttgaagaataaaactgaattctaagaaaactgaactaaaagtacaatataaacatatggtttttaaaattactttcaacagacaaaaacactttatagcagattttatcagaacaaacattttatatagggaaagaaaagaatcacaaaaattgaccattgttttcactgaaagtgagcagtgactggattgtgatggcccagtaggttcccctgtgtagtgattactgtagtgtagtcataggttgtatagaacactaagtttgcaaatcattctgggatgagaccatcctagcaggcaaggttcaactcagcagtatggatagagaaactgcttacttcaaccatgttggaaacattattgtgttagcttgtcaacaactgtaatctccctgtgttgttgttgttattattattattctttcaattttacttttatttttgctcacccacagttaagatgaatccacaatgctgtctggaaatcactgaaaagtatttaattttaagaatgaatgcattagctaaataactcccaaagcaaagaaagagtacattttgagtatcatcaggagattttgaagttacaaggtcatattattagaaaggtatctctagtgtggactgataagttttttttaaatagtttatttttattttaattgatgttttgcctgcatgtatgtcttatgagagtgtcagatcttggagttacagacagttgtgagctgttatgtgggtgctgggaattgaaccccagtcctctggaagagccagtgctcttaaccactgagccatttctccagactggtaaattttatgtgaccagcaaatgtgggatgtgctgtgttttgggtcagaaaggtgaagagcaagtgatttaacattagagaagggaaccacatagggaagggaagctttagttaacgtgatgggctatatttgaatgttaggtcaaaatttttcttaaataaattcacaacaggaagaaatggcaagtcccacatcattgagattgcttgcatcaaatacttaatatttgtatcagtaatggagtcaattaaaagatcaatgcatcacatttctgtttccatagcaaagcaactgaccaatgcctgtccttgaaatgattagttacttgtgaaatacatgatgaacattatccatagagtgtgggatgatgacattgtgtaagatgtagactttcagttttatgcatattctctgacaatgattaatagcaactttgggttaagagtctattactgatcaattattctagtaaccctccaaagagttatcagaagttattgttgtctgtgtatgagggatgagggaactgagactaagggagtacaaggacattagcttgtatttagaaacactgatctctcagctggcagattcttttcattgtatcttctcgcctttaccacagaatgcatgttggttactgactgctggatttccattgctgtgataaatatctgagagaaacaactcaataggaggaaaactgtatttgcctcatggttatacagaccattgtctatttgtggtctatttgtgccactatttaaggcccaacataatgctgggcacggtaaaaagaatgtaagaaggaacaaatgcctgccttatggctgtcaggagaaagagtgcaagccagagtgagagagacagagacagagacagagacagagatagacagacagaacaagagaggcagagacagagatagagacagagacggaaagacagccaaatgtctgcgtagttatcagcagtccttattcccttttattccatctggatctctagcctattagacattttacctaatggtaaaatctacattcatggcagctattcctgaaaatttatcttggttttactagtctctattggaaggccttgctggctggttagaggttgcagtttatcatggcctggaagctttttccaaaaacttgaagacatggagactcccaccctccctagtgaaacttcctgctctctacctgcccttatctggagaaattccctgggcctggaggactgaccttatttgaaagctgtcgctaggccagatcgtctgacttatctttagcttgacccttggcagagattcctgttagaagcctccctgactatgcatatgataactaaggcttgtgctaggagccttacggtaggattgtgccacttaatgcaaattagggtttgttcccaggttccccaatcctacatattccttatactctggaataaagctgacttgactcactgaagctaccttccagagggccgtctccattgtatccatagccactgaaccctgttccccacttctgctccctccatcctcgtggaccagttcagccagtgatcccgaagaagaagcagagccacggatctacatttcttttaatccaactagatgtacagtgtgaaaatttgcaggtgaactctgacataatttactcttgagcctccaaatacctctcccgtgtgaagtgctgttgcactccctagttcagtcttaaatcactgtaaaggaacgaagactatgattgttgcttcttcatgccagtcttccatgtctcgatttccaggcacctggtgccccaatattatctcttggttaaatttttatcacagcctttgtgatgcttaattttacatgtcagtctagacaatctggacagagagtacccaaatgtttgactaaacattattttggagtgtatttgtgtaggtttttcaaggctagtatgtgaatggtatactatataagtgtatagctggaatttctttctagcctggtcctgcagatgtttagccctaaataaacacacaaagacttttattaattagaaactgttggctcatggcttaggtttcatattggctagctctctcttaatcattaacccatttctattaatctaagtatttccatgtgatcttatcttactggagaagggtcgggacttattactccttcctccgctacatagtgtctctctcctctctccagccttcccctggtctcatggcctcacctatgctttctgcctggctattggacaatcagtgttttatttatcaaccaataggagaaatgtatatacagaagggcatcccccatcataagtgggcttcagccaggtcactgaaggactaactaatcaaagaaggaaagaaaaagggatttgctgtcttcctgacatagtaaactagggcattctttgcctctgcttcaggcctttagactcccattgagctatgtcactaacttgtctggctctgcatgtcgcagacagatcactggacttcccaatctatatcacatgggtaaatatttcataataaatctctcaactaactcccctcccccttcccatccttctcatagatatgcctccctgttggctttgttcccttgaagaaccttagatacagttgttataatgtgtaacttttgtaatatgaataaataaaagaccaagagacagatattggggttcaagttgaagattagggaagcaaagcaactagacactagctcttacctctagttcaggctgaaagggctgatccatgtactagctcttcaccaagtctcaaactgcagcctgtccacagtgtggctggagaatgaatgctgcctactgaatacttgctccagtcttttatacccttctagtgcggggggggggtgggcattaaaggtgtgagctgtatttctcttttagactgattcaatctgtgtagatttgggtgcccttggactcacagaaatctgtttacctcttaatcctgagtcctaggattaacttcaggctgctgggattaaaggtgtgtatcaccactgcctgatctctatagcttaaggctgctttaataaatcataaataatgtatcactacaaactttctctattctcctcatcaaaactgaactgtcctgtgcccctttttcttaccttcaggcaatctcctcttcctacaagtcacacagttatagtatgctaaagcaatttcccaaatcgttactggaacctgaaaacctttgatggaagttttagatagtgacagcaggctgcttactagggatctgtaaaccttacagttgtttacccacagattctaccacctcagaatgtattctgatccaaactatctatgtgatttgagccaggtcccttttctggtattattagtgcagagaactgagggaactccccagcttattagaacaaaaatgaatgagtataattaggtaatagcggagacttgtcagggggatttggccagctgcctttggctcctggtccttgtggagtttggtgagtctgtggggcagctcgcgctgtgctgctggcccaagacagcagttctagtgaaaaaaaagccccaaaccatctcactgttccatcaacttcctcatgaatggttttgtttaaaatgtttgattgtattttggaattggaggtaaaattaatgcctgagactatttctaggtgttaatcagagattcctcttcacactgttcactctcttggctcctaaaaattaagttgcagcaagcttttaaatattggcaaaaataatagatttactcaactgaatcagtttaagcaaaatttggcctaactcccattcatccatttgaatcatttaaagcacagatttttggacgttaccatttaaaaaagatacatgggttctattggggccctggcttttaagaaaaattgcttaataaaaccagagatatgcttttatttccatttcatcatggaaagcttatacataaattatctattgttgatgaagacaagtggggaataacaggttttcttaaaggagtccataaccagaatttcaggcaaattttaacttttgaaagaagtgaagcagagcttttaaatttgacagtttgaacaaatggaagatgatacactgcaataaagcccactcatttattgcggcatcatttggtctcattaacttctttcttttttaataaaagagaaggctgaaagttgaggacctctttctatagcctttgttagagatgagtggcttgggaaagatgcctcttccctttgagcttcaatcccttcatctgtaaaagggagataatcctgagaggtccccacagtcctcacagggatgctgagcggatgcactagtacatgggtatacacattaaggtccgagaacagcctcacacactgacgctcacttggcgtttgctccctgtgcacttactctcctcttcaattgcattttccttctttcttctcctggaagcaggtgtgttcctgaacattttcatacttggcacttaaaggattttgccgtaaaacatttgtgtcctaaaaatttgcacaagcatataatttgtgcacactgctatactgtgggcatccttctgcaacatgctttttcctttcttctttgtaattttgatgtgtgtggtggatgtttggcctgaatatatgtctgggcaccatacgtgtcccaggtacctgcagaggcctgaagtgggtgtcagattacatggaactggagttacagatggttgtaagtcaccatgagggtgctgggaatcaaattcaagtcctctggaaggggaaccagagtgcccaccccctctgtctgtctgtctctgctagtttgtttatattgggatgcttgcattacttatattttctacaatagaccttatcatgtttcctttttatttttatttatttcttcttgcatttattacatcccaaccacagtttctcctttctccactcctcacagtgccttttccccatctcttctctccctgagagccacacttcctccatttcccttcagaaaagaacagtcctcccaaagatatcaatcaaacacagcataacaaattatagtaagactaggcacatacccttatatcaaggctgattaggcaacttagtaggaggaaaaggatcccaaaaggcagagacctccccacccccccacccccgcccccactcccactgttaggagtctcacaagaacactaagctacataacaatgcctatatgtagaagacctagctgagagccatgcaaagttcgtgtttgctgctatagtctctgtgagcccctatgagccccacttagttgattctgtgggtcatgttcttgtagtgtccttgacccttctggctcctacaatcaatccttctttgtcctcttccacaaaattcctgagctctgcttaatgtttgactatggatctatgcttctgcccccatcagtttctggatgaaggctctctgatgaggattaggctaggctctggtctatgagtatagcagaatatcattaggaatcatttcattgatttttttggcagttgtgtttggttctatcctgggtctctgggctgtcaaacctttggttcctggccacctaggtagtgtcaggtgtgggctttctctagatgtggtcctcaagttggaccagtcattggttggccacttccacaagtttctgcaccaatgataccccagcacatattgtaggctgagctatctcatcaacccaaatatgctttttttcatagctaggtttctgaaatctcttaacattggaagacagaggttaagttcatccattttaatttcaatataatatttgcataattgaatacactgcaattttgccttttctttaatggatatttcatttactgccaattttttttgtaacataaagaatactgttgtaagcatttatggatgtccctctctgtgtatattaatataagtgagagttacttccataaaggacttgacaatgattttcatttgatttgccagtctttctgatatcactcatcccattatgtggctgccctgaagactgaagaagttaatatatttacccactttgtgaagacctgctgggaaggtctgcttcaggactgtgatattcaaattagagtatatgtaattagtccctgcttcattagttacataaacatgtacacattaacacttacctactatacatgtgtgcatacacacccaaacatgaagagtttgaatgtggatgatttaaagcaaatagctttcaaattctaagactgatttcccgagaatcacatttacctttgaagtagaatatgatagaaaagaccaattattagacattgatttattggcttatttaatgatttacttaaagcactgcttataccactcattgccaaccatgacttcatcttgctaactggaatagaatgacctggagaaattgctaaaacaataggttgttgccctaagcaacctgaccacaaaagcttatacctgtctactgtcacatcatatgcctctgaaaggcaaaaacctaacccccacataaacttttgggaagtcccacttgcttgtcttctcactccatcctatggttttagagtatgaattgatgatgcaaactgggtaagagaccgaggcctttcagtagctatccagacttcagttcactggtgacatctcctctcttccactctcattggtgctggagtgttttagtccagagagacttctacactacctctccacttcctcaccatcttctaaactgataattaaaaagtatttgttactaggcaaaattgttcactattgtaattccagaacttggaagtatgaagttggagtatttcaaatttgaggccaacctggctacataccaagactttatttcaaaaacaaacataaataacacaaatgtgttgcatttttagtgaaaattggatttagttcccactctctgctcccagtatgtgcgcgcgcgcgcgcgcacacacacacacacacacacacacacacacacacacacacacacacacattaaatttgttaattctaatgaaattagaagtggcatgttgatccatcaatgatttaaattcaaatattttgtagaatggagtagcatgacattttgtttagtgatctcacctattttgtcttccatttgccaaagaacacaactcccttgagtcctgtgagaggaaaaacacctaagaaatgtggaggggcttcagagggcactggtatcatatttcatctaagcaaggagctcatgatgatgtcttggtctttgctcttccaagaatattgacagtttgtaagaaaacatgatggaagatgccactttagaaccaacacgttacattgtagaatagatgccttctctcattcagtgggaaaagactattggatattataaattcatatatatttttttatttggacttaggcatgtttgtggttattcaccaaccctttttatgttcatttgtttttgatcaccatgtacttgtttggtttatataaacaggtgtgaatgggagattttgctacttaaaaataccctatgggtaatacagtatggggaaggtgtgcataacagctaccttccctctatctgctgttaatttaacatgaactctgcttcatttcagaaataaacaataattatcactgagtctataaactgaatgaaaacaccagctgactattatttttactaaaagattaatttctgataaaattatacattgaataattactcattacagtttttaatgcattcagctttaataaatagtaatttaggagtaattaatataacaggattggtaaaattttatttgctgcttaaaattaattataacattttcaatagagaaaattaatcttaacaatttcagttacaagaaaacaaacttttataaattttaggacatgcatatttttataacagaaatgtaatagagtaataaataaaaacattcaaatgtaaatacataaaatagaacactgaaaaaatgcttgtgggtttttaacataagtggtaaatactcagccctgaaaacatatgcaagtaactttatattgactgaacatgcaccatttagaaatatatatgtgtgtgtttatgtatgcatgtatgggtgtgtatgtatgtatgtatgtatgtatgtatgtatgtatgtatcaacaatccacaaaagaagaggccattcatttgaaagaaagcaagaaggagagatatgtgggagtgcttggagggagggaaaggaagggagaaatgattatattaaaatcatcagaaaaaagaaaaagagatacaattgatttttgaaggaaaaatagatggcaatagtttcctgatactgttttgagtagattgttaaaaaactgacatacattacagttttattttctaaattagcagaagaaccagccctctgtgggttctctgcccatggagtcaaacaacagcagcttaaaaatatttgagaaaaaagttgagtcagtagtggacatgctcaggccctgttctctcatcattgtctcctgaacaaggcaccgtgatgttcctggaagcagtcctctaagaatactgagacatgattcttaaaacaattcaaaattacacattttcaagtatttccacttataacttacttaaaatattgtgagtagctacatagttccccaaattattttatggatgtgttcaagataatttacaagccaaatggtttcatagcatgccaaagtggatggggatgaatatacttaagtagaatttgccaattctaagtgactctgccatctcacactcccacaatgatgtgtaagggggttctcttattttctcaaatacttcctactgtcagctttaatgatgttggtcttctgaagagttgaagctgtgtttccctggtggctgtggaggttaaatgctttgtgcatttgttatccatctttatttttgcttctgaaaattgtctgctcattgctttgtgaagtttctgttggtcagtagtgatatatgtttgtactgtagggcctttatttttagagctttttttcagggctatttttcattttcttttgccgtgtcttctaattctcaatctagttctcaactgaagttattttctttgatcaagttttcctatacatggtctattgccatggttaactgctgacttttcattttggctgacaatttgagaagatatagtccgtcctggaagagaaggtgtggctataggagcatgagatgtttgagctctttgtgtactctgaaagtggagaaatatggatgcttgtgttcagcttggcttttccttcgtattgagtctagcaccacagctcatgagatgaagacaccacctttagagtgggcttttctttttcactgaagcctttctggaaactcttataaacatatatacataaaggtgagttactatgtgattctaaatccaaccaagttgaccacagagatcaatcatcacagtcttccaggtaaaagctgcccatctccaactgttctcttctcccagtgcactcctaactgaaggctgtaaaatcagtccttctgaagaaagggtggtgttgcttgcttcacacatcctaccccaattatatttctgatgggaaaagtggagtggggatgaggactagagaaaaaggagaatgacaggaggaaaggggacaggggtacttttcacttaactggtgtttgtatttttcatttgcagtcctgtggtagcatctccatctctgaattttgacaggggcagcaaagctcacacatgtgtggcactggcacaaaacagcctgttgtcaagcatactgtctgttactattgtcagctttttttttactctgcttgtattggggtttgtcagcttaagtgaatttatcagaaaggcttgtgtaaaataaaccacaaaaagcaccatacaaaggaaaaccagaatactcaggtaaggaacataaagtataataaataaagccatcccaatgcctccagaagtttataagtccctaaaagttgaaagcaaaatgattgagatgttgggaagagatttcttaatcttacttctaggaaggatcggtgatcacacagaggactcattcaagcagcagatgagcgaaataagaaaatctacacagcacccagatgaaaaagctagcaaagtggatgaaaggtgagtgacatagtagagaaactgaaaactgtgtaggaaaacttcagcaaatcagttgaagttatgtacaaggacaaaaaataaaaacaataaaattacaggaatgaagtggatggattatttacaaataacccacagtgcaccatcaatacataataggaaagattgttaatgatggaagatgaggcagaagttatatccgtaaagaaaaaaacaattgagaagaactctggggatacaaccaaaagggaaaataaacctcagaattcacagataagaagaaggacccaagatctgagttgaagccatagagagtctactcaatgaaattatagcagaaatttcccaaaagtcagataaagaagtagacacccaaatgtaagatatattttaggaacccagatagtcatgattggagaacttatggtcaaactgtcaaatgtataaagcaaagaaaggagttatagaagctataagttaactccagttgacctacaaagggcaaacatcagatttctcaccaggagaacacagaatgacaaagtacaaatctatcagtcaagattgctgtatccatcaaagttatctgtataaaatcaatggagaaacaaaggcatttcagcacaaacacaagctatcacataacaataaagccatcatgacaataaagccatcagtgtagatatgtaaatgaatgctgtacagagaggaagaagaaaggcaatagcaagcatgagagaacaatacagaataaattttatgaggacttgttggaaaacacagaggtaattatgaatccattacacagaacatagaaaatcttaaaacccctaagactaataggggaaccctccccaaaatcttaaattagccagaaaataaaaacaataaaattacaggaatgaataacttttccaaattataaccttaaatgttaataggcttatctcctcactaatatgatgcaaaatagctgactacattaaaaaattaggtgagttgtttgttgtctctatagaatgagggagaacgtttatcaagcaaatagtagctggcagaagatagcatagccattctgatactagatcagatagatggtaaatcaaaattagtcagaagagataaagaagaccattaagtattaataaagagaacaattctttaagactatatgagttctaagccagcatagtctacaaagcagatggcagtactgttgaacagagaaaccctgtcttgaaaaacgaacaaaaaatatgtgaaaattgcatatgtatatgtactgagtcatgaggggtatcaattttataaaactgataatgaccacaaattgtcaaacatgtcttgatatgataatggtgacttgggtacccaattctcatctctacatagttcacctaaactaataaaccatgagcaatactttcagttgtatcatgcatggatcaaatggttttagtagatagaatattcagaatattctttgttttcttttttaaaatttcattagaaacaagcttctttaatatgtcaatcccagttccctttccctcccctcctcccctgcacccccacctccttcccaacctttttctgctccccaaggaaggcaaggccttccatgggagatcttcaaagtctgtcatatcatttggagcaggagctagaaattccccatgtgtctaggcgagagcttatccctctatgtggagtgggctcccaaagtccattcatgtaataggtataaatactgatccactaccagagggcccatagattaagcagatatccaaactgacatccttgttcagaggttctggatcagacctatgctgatttcccagctatcagtctggggtccatgagcaaccccttgttcagggcagctgtccctgtgggtttctccagtctggttttgactcctttcctcatcactccttcctctctgcaacggcattccagagttcagctcagggtttagctgtaggtgtctgcctctacttccatcagctactggatgaaggtgctaggatagcatataaagtagtcatcaatctcattattggagaagggcatttaaggtagcttctcaaccactgcttagattgttggggtcaaacttgtaaatctctggacatttccctagtgccagaattctctaaaaacctataatggctccctctattgtggtatctcttttattgctctcctcaattcttcccctgactaaatcttcaggctctctcatgtcctcctctcctgttctccccctctcttttctttagtttcctctccccttccccacgctcccaattagctcaggagatcttgtcccttttcccttctctgggggaccatgtatgtctctcttagggtcctccttgtttcttagcttctctggaggtgtggattttaggctgataattatttgctctatgtctaaattccatatatgagtgagtacgtaccatgtttgtcttttttgtgactgggttacctcactcaggatggtttcttctagttgcatccatttgcctgaaaatttcaagattctattgttttttccactgagtagtactccattgtgtaaatgtaccacattttctccatccctttttcagttgaggggcatctaggttgcttccaggttctggctattacaaatagtgctgctatgaacatggttgaacagatgtccttgttgtatgaatgtgcatcttttgggtatatgcctaacagtggaagtgctgtatcttgaggtagactgattcccattttcttgaggaaccatcatactgatttccaaagtgactgcagaagttgacacttccaccatcagtggaggagtgttcctctttctccacatcctctccagcataaactgtcattggtgtttttgattttagccattctgacaggagtaagatgctatctcagagttgttttgatttgcatttctctgatgactaaggatgttgagcactttcttatgtgtctttcagtcattttagattcctccattgagaattctctatttagttctataccccactttttaattgtattatttggtgttttggtaactagcttctcgagttctttgtattttttggaaatcagccctctgtcagatgtggggtaggtgactatcttttcccattctgtgggcttccgttttgtttcactgactgtgtcctttgctttacagagacttttcagtttcaggaggtcccatttattatttgtcgatctcagtgtctgtgctactattgtgatgttcaggaagtggtctcctgtgagggtaccacgtactttctcttctaagaggttcagtgtggctggatttatgttgaggtctttgatccattttgacttaagttttgtgcatggtgatagatatggatctagctgcagtcttctacacaccagcatccagtaatgccagcaccatttgttgaagatgctttcttttttccattgtataattttagcttctttataaaaaataagatgtttgtaggtgtgtaggttaatatcagggttttcaattcaattccattggtctacttgtctatttttgttccaataccaagctcttatcaggactatatctctgtaataaagcttgaagtcagagatagtgatgacttcggatgttcctttattgtacagggttgttttggctatcctgggtcttttgtttttccatataaagttgagtattgttctttcaaggtctgtgaagagttatactgggattttgatggggattgcattgaatctgtagattgcttttgacaagattgccatttttactatgttgatcctacctatctaagagcatggaaaatctttccattttctggtatcttctttaatttttctttaaagactctaggttcttactatacaggtctttcacttgtttggttagcattaccccaagatattttatgttgtttatggctattgtaaagggtgatgtttctctgatttctttctcagtccattcatcatctgtatatagtagggctactgattttttttagttaatcttgtatcttgccactttgctgaaggtgtttatcagctgttggagttccctggtagagtttttcaggtcacttatataaactattatatcatctgcaaataatgaaagtttgacttcttttccaatttgtatccacttgatctccttttttttttttttgtctaaatgctttagctagaacttcaaggacaatattgaagaggtatggagagagttgacagccttgtcttgttactgattttagaggaattgccttgagtttctgtccatttagtttgatgttggctattggttgactgaatattgcttttattatgtttaggtatgttgctgttatctctgatctctccaagacctttatcatgaagaggtgttggattttgtcaaaggctttttcagcatctagtttgatgttaatgtgatttttcattctctgtttctatggaagattatattgatggattttcatatgttgaaccatccttgcatccctgggacgaaacctacttgatcatggtggatgatttttctgatgtgttcttggattcattttgccagtattttattgagtatttttgcatcaatgtttatgaggtatagtggtttgtagttctttttattagttgtgttgttgtgtggcttgggtaccaatgttattgaagcctggtaaaaggagttcggcaatgacccttcagcttctattgcgtggaacactttgaggagaattggtattagctattctttgagtttctggtcaaattctgcactgaagccatctggccctaggctttttttggttggaagacttttgatgactgcttctatttcatttggggctataggtctatttacattgctcatctgttctttatttaattttggtaaaggtatctatccaggaaattgtccatttcctttagatttttgaattctgaggagtatgtgttttcaaaatatgacctgatgattctctggatttcctcagtgtctgttgttatgtcccccttttcatttctgggtttgttaatttgctgaattctaactttaaagcatggtgctctgctaagatacagggagttattccaattttttggtacctgttgaggtttgctatgttgccaagtatgtggttaattttagagaaggttccatgtggcaccgagaagaaggtatattcttttgtgtttggatggaatgctctagctctatagatgtctgttaaagccagttgggtcatacttctgttagttcttttgtttctttgttaagtttctgtctggtagtcttgtctcgtggtgatagtggtgtgttaaagtctcccactataagtgtgtgtggttttatatgtgatttgagtttaaataatgcttattttatgaatgtggatgcctttgtattgggggcatagatatacagaattgagacttcatcatgatgtatttctcctttgatgaatatgaaatgacctccttcatgtcttttgattgattttcatttaaaatcaaatttgttagacattaggattgctacccctgcttgtttcttgggtccatttgattggaaaatcttttcccagcccttaattctgaggtactgtctctctttgaatttgaggcatgtttctaccttcagaatattctaaccaacagacatgagatacatatctacttggaagcccttgacacctaattagaccatatgttaggttgaaacaaacatcttcaccaaataactttttaattttcagattatagcagtgtaaagaggaaattaaattccaaattaaaggaaaagaaacaaatgtgtctaaatgaaatgaaattcaagattcacacataataaattgaaaattacacattataaccaagttggcttcattctggtgatgaaagtttacttcaccctatgcaaatcagaacatgaaagacagcatctaagtacaatgaatacatcatacgatcatcatgatgcagagaaaacctttgacaaagaaatgccctgtgggggtcttttttccctttcatcctatgggccatcggttgagaggagaaaggagcagaaggggcgacagaaagctttgtatgcagccatgagcatggacagaggggggcctccggggaaacagaatttggtgaatgagctcaattttcttccaaagtataaggaatatataggattgaggagtctggggacaaacccaaatttgcattatatggcacactgctatcacaagggttagtatgtgtcagtagggtcccatagcagagcgcctagcacaggtcttcttaacagaggtctgtgtcaagagtcaagctaaagatgaatcaggcatctgctttagaggtagctttcatatcaggtcagtccttcaggcccagggacattctccagataagggcaggtagagagcaaaaggccttgctgtggagggagggagttttcatatagccaagcttagaaagaaagttactaggctatggctgactgcaacttctaaccagtcagtaatgtatttcaataatacccattcattataaattcctttaggaaactaggaatagagggaacatatctccacatagtaaagtctgtgaaggataaacctatggtcaattatacacccaatgacatgaacttgaaggcatgtcctctaaaatcaggaaagagaaaagggtgtcaaatctcattcttctgattccatttagtcttacttagtgcaacaacatcagaaaaaaagagtcaaatatgaaaagaagttaaatattcctattttcagatgaagttattctgtacttaaaaaccttcaccagaaaaatatttatatatgataaaactttcagagaagtcacagcattaaaaagtctgcacaaaaaaactgtattttcttgactgctaataatgaatttctctagtggaaaaagaaaacaaattcattcataatagcttcataaaaagtgaatacatacttcatttaggagttatcaaggtgaaagacctctactgtaaagaatattccactggtgaacccaccacgctctatagttagtcacaaacttagaatcacacagacatccctagctaaattctaagggacactaaacaccaaaaccagtaataggagaaagaaatttgtagagaggaggatgggctggtaggggtgggagggaaataggaaaaagtggtcaggagagagaatatatagagtaaatgtataaaattgtgaaagaactttataaataataaaatttaaaatttattaataaaatagatgataccaaagaaagaaattgaagcaggcactagatgacagaatgacatttcacgctcacagggtaaaataattaatacagtaaaatgactatattgcccccaaatcttaaaaagtaaatgcaatgctcatcaaaattccaaagacatttttcacataagtagaaaaatattttaaaatacacaaaccatcaaatatcctcaaagaagaaagaataattttggagccattgcaattcctgattttaaattatattatagaaccatattaacaaaaatagcatatacctcaagggctgtggattgtcattccattgagacagttgttcatccatgtttactgctgcgttaccctcaatagccatggtatagaaacaggctaagatacccagcaatatatgaatggataagtaaagtgtggtgcacacaatggaattttattcatccacaaaggataaaattgtgacatttgtaagaaaaagttggttattattaagtcaaacaaatcagtcttagaaataattcataggtctgtgtaggccatggatataacaggtgttatgatatgggaataagaaatttacaggagcaagtaagaaggggagtaagagaggggaatgaacaatacattatatggaagcagcagagatactatttggagtaaagagaccagaaagagggtggatggagttgtggggaggtcagtagagggaacattcgaagtgcaatgatgaatgtgtacgggaatgaatacattattttgtatgctaaaattagtaaaacaacgaaaattcaatggacttttaatctaggttataaggaaaagatataaataaaatttgataaagtaaaaaaaaaaaccctgacataagattacaagaacacaaatctccaaaaaatgctgttgggtttgtattctgctggctgttgactgctgggtatgcaagcgaccctcaggagtatattgtttctccagtatttttcatttgcaagtggttatcaattggagatagcttctgggttagggctggggccatgtgtccacttctcccttcaggtctaggatctcccccccaacccccgtgcagatccatgcaggacatgttcatgatgcctcagtctctgtaaatcagtatgtgtgtcaatactgttgatttagaggactttgttgtcatggtgtcctctatcctatctggctcctacagcctttccacctcccctccaaggggttccctgagtcctgaggagaggaatttgatggagacagcccatttagggctgagtgctccaaggtctcttaatctctgcataatatctggctatgggtgtctgttctcatctgctgcaggatgaagcttctctgttgatggccaagcaaggtactgatctacaaatatagcagaatcattttattgctatgttcctttagtagaacagtactatttggttttaccgtaggtttctggtctatttagtctcaggttcttggtcccccaagaagttttgggtatgtgtttctataacatgagattcttctggcctggctaggtcctgctgtccctctctgcccttgtgtatttatcttactggagaaaggttcagggacctgtactcctctggcatcctgcatgtcgactgctcagcagagaggagaagagaagagaggagaggagagtgatttcttgtttgtccctgcttatattctgattctgcccagctacatcacttcccacctggccaatcagccaatcaatgttttattcattagacaataagagaaacatatacacagaaggacttcccccatcatctcctcttttctgtctaaataaaaagaaaggttttaactttaacatagtaaaattatataatcaaacagttaccaaatgagagctatagttataatatttagctcattaacatttagcaagatttaaagaaagtattctatcatctatcctatcattgagagtctgaagtcttatatgtaacttatcttttatcctcactaagggaaactataaccataactatacatcatcaactccatcaaagaccacaggacaatagtatacaaactctagaattgacagagacatcttgctacctggacagttacccgaaattcttctgaaatgtctgggcatccatctttggcccataggccacaatgtgtctgacagacttcccagtgaagcaggaaattttaaattgtctgcctgcattggcagtttgtcagtcatttttctgtgtgctgtagaatgtctggtagactcttccatgaagcaggaacccttcttgactgtccatattgttttgcaagttcagcagtcactttcctgtgggtcctgcatgtccagtttatacagcaacagtcagtctaggcaagagcggtttcttgctcaaatggctagtcttgccatattgaaagcaaactccataacgagtttctttgatgcccatcttcctctccaacataattggtattgccaggagcagttgtgtctcactgtcaacaaaatccaaaaccattttaaatggcatattctgaaggtttttgaaaggtttgaagaacatccatctcaagtatatctctgtttatctagaaaacctaactaacctaagtataagttttgactattgtagctgactatatataatctgtatttagttaaccattacattttaaaagatctgtataaacacaataatacctaaacaagaggagaaatatacatataacagaatgaccttaaatttgtatcaataaatgaaaatccattccaatgcaaggtattcatttctatatcatagtccccttttttcctttagagattggctttgatcattaaccacttatagccaactccatttaaatgaaaacaaacatttataaacaatatttgggaatgtgagcagtggatgttttagcaactgtctttccaagatggcagagggggggtacgttgtgctcactgccttggtctatgctgtcatcaaatagcaggctgttggcttgaagatgtggtcactgtcactgacagctgctcagacacaacattcaattgttaacaggccctcttaaaagagcattgcatttttctgcttatgctgagtcaggaagactcctctaaaggagccgtgtgagtctctgcttgtctctagcaaaacagagctcacttgagaaaaatgctgctaccaagaagctatgcttgactttgttcttttgtttctaaaatccctttttaaccttttgtcaggttgaaattcatgtctcacattgaggatgctattttgtaacatacattcttcccaccagcctgggcccattgcaatgtctgtcacaaatgaacacacaaatgctatattgtttgaaattgttggccagcgactatggcctcttattggctagctccatctaaattaacccatttctaatatctaagtatttgcatgtagacttatcttaccagaaaaaaggttcagctctcttactcctttggggtctgcatcacatctgtccagcatctccacagagaagagaggagagcgatttcctgtttgtccctgcttatattctgattctgcccagctatgtcacttctgcctggccaatcagccaatcagtgttttattcattaaccaataagagaaacatatacacagaaggacttaccctgtcatgttccatctcatagaggaggccttaagtcaaatcagataattgttggttgttgggcgatatttgttcaaactgtgtgaaaggcaccttctggtttaatgaaaagatgaatggcaatagataggaagtagaggataggtgggactaccaggcagagataggaactctgggaagaagagagtgggattctccagagagaagtggaggaatttgtacatacagtacttaggagaggtaatgagccacgtggcagagtataggttaatataaatgggttattttaagctttaagagctagttgggaacaagcctaaactaaggccaaactttcataaagaagtctctgtgtcaatatttgggagttgactgtccaaagaaagtctggctacagttggttagtcccacaggtttgtgccatggttacactaacatatcttgcaggcagtacattgttgtgaataaaagggtttgcagctgggttgctgtttatgtttctcctttgatagcagggtaccttcttgaacaaaagactctagcatatggggtgatgcctctaggaaggtagtggctcgacttctccatgttcagtgagttgtgtaggcattgtcctcactaatgtggccttattatatgtttgtgagggctgacccacagtcttaaaaacagtatgggttgtttgagggttctaatggaatccctttggctaacaactcaattagatgtaacccaggctggaaacttcatttggtgacaagagatgtccagttgtggctctatattccccattatgtggtgattttatttagacttcctttataatatgtatatattctaggaaacttttacttgtattgattttccatactacccttaaatggcccttaattttctctatccctccctgtattccctctctcatctcctcttacctctccccttccaactgatcctccacttcctgaaaccctctctatatatcccaaactatctattctacttcctcttttaagggagctctatccgtacttcctagttcattactctctacctaacccctatggttctgcatattgtatcttgcttatcattgacttaacagctaatatccataaataagcaaatacatacatatttgtttttctgtgtctgggatacctctgtcaggaagattttcttctatttaatccatttatctgtaaatttaatgacttcaccttttaatggctgagtaatattccattgtgtaaatgtagcacatttcctttatccagtcattgttgaggtacatataggttgtttcccatttctattctgaacagagaagcaaagaacatggttgatcaagtgtctttgtgataggattaagcataatttgggtatatgcccaagagtggtatagctggatcttgaggtagattgattcctatcgtcctgaggaaataccacagtgatttacatggtggctatacttttttttaacttcctctagcaatggatcaatgttcctattactctacttactcattagaatgagctattttattgattttagccattctgactagtgcaaaataaatttcaaagtaattttgatttgcatttccctgagacctaagaatgttgaacatttttttcagacatttgagttccctcttttgaaaattctttgtatgggtctgtacttcattttaaattaggttatctgttttcttgatatctagtttctcaagttttctatatattttgtatattagccttttattggatgtgtagttggtaagctgctgctttgtctaatgatgggttctttgctatgcagaagcttttcagtttcatgaggtcccaattattatttaacttaatgcttgtgctaaaggtgttcggttcagaaagtcttctgtgccaatgagttcaagactatttcagactttctgtgctatcaggttcagtgtatctgtttttatgttgaggtctttgattcattgagcattgagttttgtgcagggtgataaatatgaatctatttgaattcttctatatgcagccatccaatctgacaagacccatttgttaaagatgctgcattttttagtgtgtatttctggcttctttatatataaaaagcaggtgtctattggtgtgtggatttatgtttgggtcttcagttcagttccattgatcaatgtgtctgtttttgtctcaataccatcagttcttatgggagcaggattgctggaccataaactaacatgcatatttagatttagaaaatctcacctaatatagatcaattatatcccaatgagcaatgcattagtgccttccccaaatattttatttatcttcaaaattagttcacctgatagtgctagtttgatgttaattagtttctctttaacatgtctgaataataaataccgtggactgagaagcttctatggtgattttggtagcagttgttggtgcttgtggagagtggattcaaaagttgaaagaattccaatctcttcgatgactgtggagctttcagtctgcttccttcagatgtcttccagtaaatttcacatctgtttgtttaagttagttcaaggtgggcttctgagagtagctgctaggaaatttctgcctcaaagagaccctgtactggaatgaacatttgagaagctcttccaggcttcctgtttctaatatttcaaagttcataattatgagtgaacattttgcttcatcatccatgctgtataacacatcccacatctctaccttctaattatgacacggagtgcatttcccacattgcacaggtgggaaattggaattcctgggatctttgcccaagttgttgctgaagtagggtttcctattttcttttactaaagcttttattggttattattattaacacaggtgtatgtgtgttttcttgtgtgtgtgtccatatatgtgtatgtgtacacctatgtataagatacggtgcatatgtgtagaggtcacagaacagttatcaggagttgattctgtcctccaagggatccagctgaggttgttatgcttgtatggaaagcacctttaaccacaatgtcatctccccggcccttggtagtgttctctagacctgcttgggatgctatgcctgaaacctttacaaatcaccatggcagagaagttcttattaaagggaggtgaacatcttcagcagtggtgatatttatatgaaaccaggtaagcaacagttactacaagtgtcgagtcacgaaatccactcaggagaatttcttatgatttgcaacagaagaggaggaggatcccagtgagggctacaaaaactctctcagaatgaggggtgaatgttgagggatcattttcagtctatgtctctcctggatatatagcaagaagcaggatcactggaacaaatataattgatttttattggaattaacttgccaatcattcctcaaatgatgctttgattttaaacagacaactgaatttctgtaaagctttttcacacaaccaatcacagtatgaatttctgcaaagctatttcacatgaccaatcagtcagcatgtttttttcccagctacttgcaataagaaaaaaaaatcaatcatttgttagaacataagaagtttgtctccactcattgctgcttgcacagtctatgctttgttttcagttctataaacttctggtctcactagatgttttgcaggtgctacaaccattaactgcaagaccacaggatgaggcattcctacgtggggaataggttccaaaaagccagctcatggaccagggacaggtcccgatcccatttccagtggtctccaaaacatatcaagttgtacaactgtcattgacatgcagagggtctaggtaagtcagtcccatgtcccatgcaggcttcatagctgccagtccagagtccatgagcttccatgagctgtctctgtgggtttccctagcattgtcttgaccctggagctaggttcagtgcttagctgtgaacctctgcatctgcttccatcagttactggatgaatgctgtctgttgacaattaggttagtcaccaattgattacaggagaaggccaattcaggcaccctctccactattctaggagtcttagcaggaagagggaggagcttgttcctgtctcaaggtgacatgctttttaacttccatggaaggcctgactctttttaaaaagaggagtggatagaggtggggagggatggatgggaggtggggagagggaacaggaagagaggagggaggggaaactgtggccagtatgtaaaataaatgaaaaattaataaaatagacaaaaatgactgtaagatgactaggatgttctgttcccccccaaattaaaatgcaaatgaggctaatgttgagcttgtcacaaaagcattgaggagataattcccctctgtaagtttaaagtggtatgaaacccaggtttcccagtgtccaggagtcctcctttaatttttgacactgagccatgaaaggcagaagtcctgattctttttattctaccctttccaggtttctgagataccacagtgaaaacatttctattcgtgtctcactccagttaccacctcagctgactctttatgcatccatgtcttcttcctttgcaggtcctcattgatgtgcggttactggtttccctctctgtctagttttgctgcataatgagtgtagatctggcccagataacttcaaaccaagtgtggtgctgagccaacatcactgaagctgtgtttatagcacaagtggagtataaataaaaatattacagtggctccctgctccccacggtcaaggggcctcttatacatcagtggtttgtttataaatgtagaacagacccacagaggaatgtgcagggacctgggcctgggcacctgagcagccgtcaatgtctgaccttagaatgactcagggagggacatgttatagacacatgggaggaggagagttgtctgttgcctgagccaggcagtctcacacataggaagaaggggagttaatgttctgaactcctcttcttccttccatcttctgcctggtctgcccactagcccaactcagagggcacgggagattgcccacatagtggggtcaggctctcaaggagaagtaggcatggaatggcaaatgaagatacctcctgcataatcactaagaaggaacaacattgtgctgatgaaaccagaggcaatgctcttttatcatttagaatttttattttgaatgtattgaaagagaattgttaaacagataaaaattcaattatttttcttatcagatagtaccttcctagattaaaaatgactttacatttcagtgctaaacaatggtgtaatcttttatcaaacagtttgtggcagattcttctacactcctgctagcaaaaatgactagaatgcagcttctagataaactttactctccattaagacaggaaacctgatttctcaccccaagcctcagggtgctgcaggtttgcctgtaagcaaaagaaggcagcagcaaagtgttgcatggcttctgaagacagatctgagaagctggcagccagcttgctgaaaagtgtgtcagagcccagagcctccatggtaacattctgaagccccctgtgacatccaagctctgaagaaaccaggctggctggactcctagagagtcacgtggaaaagcaccgagagtacatagaagatgaaactggtttccagcctctcctgttccccccaaacttcctgtttgctctggtgtcagccactgtgggacaaggaaatgggttcttagaagacttccttttggaattccatcgtggctaatagaaacagagaagaaatggttgctgtcattttaagccatgacggtttgagatgactcgttatgtagcaagagtaaccaaagcaattttaaatgccagtgcaattctaaaaatgtctcccagacacgtataattcattgaagtgacacagcatggataaccataagcatgtctccaagtacccagtggcctcctgggcagcagctatgggaagtgccgccaattttaagaactgtgcttataaagatatgaacaaaacaaacacatcccacttaggattgatgaaatgttgcagtacaggtgcagtgggagagacaaaaagaacaaacgagttagagagcatgctggcaaaactctattctgaaaaagtttaatagcttgtagttaaaatgacaagagttaactaagagccacaatggtacaaaaacaaagcaaaacaaaacgaaatgactagaaagacaacaaaattactgaaatttcaccagccagaaataaactcctagatattttagtacacataggcatatacatttatagcacacataatgatttagctgagattgtcctaccctggctcagtgctcatacatacataacacacacacacacacacacacacacacacacacacacacacacggcgctctatgtaccacactaccttacttatttaaccaaccacttagtgattgacattttgttttgtcttttcaattttatgagtaaaacagtgggttatatttacatatatttcttccctactgtgtaattgcatttttgtagagaatttctatatacatgagattgttggattgaacggagtttatttataactgattctaaagaaaatcacatttataatttggcatggattgataaaacacctccctggaaagcccttgtttcttcatcctgttcagtagcttatggacaagagcaattctttccctttggccatgttcaggctttgtcatttatgtgatgagttttgtggattttttccttttttaaaaaaaattagaaacaatcgttttacatatcaatcccccattccctctccttcccatcctcccatacctccccaactctcccaacccaccccctacctgctcctcaaggacggtgaggccttccatggggggttatcaagatctatcacatcattggggggcggggctaggccctcctccgtctatctgggctgaaatagtatccctccatagggaatgggctcccaaagtccatttgtgcattagggataaacactggttctactgttagaggtcccatagcctgcccaggcctcctaactggcattcacattcagagggtttggttcagaccaatgctgattcctcagctttatgactggggtccatgtgctctcactaggtcaggtcaagtggttctgtaggtttcttcagcaaggtctcgactgctttgctcatccctcctccctctctacaactagattctaggagtatggctcagtgcttagctgtgggttcctgcttctgcttccatcaactactggatgaaggctgtttaggggacctgctttggtcctatgttggctccacagctgtcagactggggtctatgagttcccacttgctcaggtcagctgtttctgcaggtttccccagcatgctcttgacttctttgttggtcactccttcctctctgaaactggattccaggagttgggctcagtgcctagctgtggatctctgcttctgcttccatcagctactggatgaaggctctaggatggtgtttaaggtagtcatcaatctcattataggggaagggcatttatggtagcctctccattattgcttaggtcatccttgtggatctctgtacaattcccaagtgccagatttccctttaaacctatagtggctccctctattgatgtgtctcttttcttgttctcctctattcctctccccactcaatccttctggtccctcatgttctcctccccctcctctttctcctacctccttccctcctccccccatgctcccaatttgttcaggggctcttgtcttttccacttcactagggggccatgtatgtctctcttatggtcctacgtgtttccttgcttctctggaggtgtggagttttgtggttttaaagatttccttttccctgtttgtgtgtgcatctcagcaagtgatgaaactgaactgctttgtacatttgttcacttgaacttttatgaattgactcgtgattgtctttggccatctttttttcataagtagtagtttgtggaagcacttgtgtaatagtagtgattctttatgcattgtttttcttgctatatttttctttcaaacattatcattgtggtattttggttttgttgcccagaaattctatgtgaattgattttactctatagtttctggctttggtgacaaaaattcttgttccaatttgttgtattaaaagcatttactcaaatgctttggatcccatattcattttttacacttatcattaattttaatgtacttatagtttatggaacttaactcctataatgaggccagtttccccacatcatttagagaataaccacttttccccagttactggaaatgatacatttaccatctactgaatcctcctcatatatgcctctgtgcctgagattccttggaaaactgtttctgttttattctccatgctaacacagttgatgctattgttcctattacttcgaaatataaggagttaccctctaaacatgaaagtgcctgctcctccctccttccccttgaatgatttttgttatgttctttacagatgaattttaaagaaatcattaagtgctgaaacagaggagatggcatagtggataagagctcttggatccccagaattcaagtaaaaagtcaagaggagtcatacgggtgtctgtcatcccagtgctggagtggtagagacaggagtattgctggatttgttggctaacagcctagccccccagttcagggaaagaccttgtctcaaagacataagctgggcagtgatggagcagggcatctgatgctctctctcccttagtcttcatgcaatctatgggcatgtgcatctatatgcccatgggcacataaaccacacacacatcacacatatacacgtgtacacatatttacacatacattcatgcgacttaaaaatgttaatcctgtggtgattttgtttagagtttacagcactacatcttcctgaccagaaacaaaggccgcctttcatttagccaattgatttttatttctgtgtatgcttttttttttaaaataatctctagtgatacaaatttcctttcagtttttgtcatttttgttacttgttgctattgtgaatgttgtagttctctatctggttttaacccatatgtgaagtgagtaattgtgtttttgtgtactcaattttaaattgtttgccttaatgatctttttctccttccttccttcctctttccctccctgccatccttcttcatttctttcttctttcctttttttagagagagggtatctctatccttggctgcccaggaactccctctgtagaccaggctggactggaactcacagacgtccctttggagtactgggattaaaggcaacaccatcatctctggctaatgattttcttaacagttccaaaacttttccattttttctctggaggttttcaggaaattataaatttaaaaaagttacacaaattttattgaatggaaatactgatattttgcagctgcccatgagtgtgtatagcttatttaattttcttgattgattgcattgtcttgaatactcagaacagtattagatgattgtaacttctttgactttaatggaaatgttttcattatttctccactaagtgtcatactggacttagatttgcataaaattttacaatagtatccagtcattgctcatccaaatttattttacagtttgtttttgaaaagaagaacagatttggaatgaaataaacattggacagctaaaatttacattatataattgtatttactaatatgaaattactcctaaagcataaaatgacatttatccactatctaattgtggtgatatattgtttatgatcaaataaagcttgcctggagatcagagaagcaaagcagccagtcactagagaattctcacgtctactaatgctcagactgaaggggtgaccttgtcctctgactgcatctccagactgcactgctcctcagactgcctcaaactgccattagttcctgctttatattcctctctccacctagccttatcactcctgtttccacctccctagtgctgggattaaaggtgtgacctctgtttctctacataagacaggaggcgggtctctgagctgacaattagtctccagccacattgaggacaggaaggcattcagtctccagccatgttgaggatttgtggagccagtatcaccctcccagccttggtagaggtaagagctagtgactggctgctttgcttttctgatctcctggcaagctttattagatcataaacaatatatcaccacatctaatatcccctggagggatttagttctattctaatgctctgtttatggtttttggggtgtgatttgtcagctgtttttatttgatatgatttgtaatagtgtcatgttgtttataatgtgcatttgggatatttcttctttctctagaaaatttctcaggtcttagtgaagagccttatttaggtaaatgaataggatttacttacaagtaaaatgattctaccagttgttgttcttttgcttgttttgtttgtttgtttgttgacaaggggtttttaaaaagcttgctcatttacttatggctttgatgtcataatgaaaggctttccacatcatgttttacttaaagtgtactcaagcaagatgttgtagctcatgcctgcaatatcaacacttgggatgttgagtcaggaggattgctatgattttgaatccaaatgtgggcaacatagcaaaaactcaaaaacaacaaaaatttcccagaggtgtctactcatacttttgtcttattcattaaagttttcctcctttgaataaggttgtgcacgtgttcttttaattatatggccatttctggtttctcacaagggataggttggtaccaaatgcatgtgttcaagtcctttcagtaacatgacacagtttttacatgtagcctgcacacatctgctgtatattttagataattcctgggttacctacaaaacctaatacaatgtaaatgccatgtcaacatggttttgctgtggcaatcattgttgtttagggtgtaatgacacaggaaaacaaaagtcggtgtgtgtttagtactggtacaatataatttccagaatatttgcaacttgaaatatggaactcccagatggggagatctgactgcatattctattttggttttaagtattaattgtaatggtgatatttttgctaaagacaagttttttttctcaaacagaaaaataagccaaacatcagcaaagaaacacttggcagtgttggccatcttaggtaaagtataaaagatggcagcaaatacaactgagtagttgaagatactaatatgtgagaattaccagagacacataggataatgagaactttcagtatccctacattttctttttttttccctagtcatgaagatgaagatttgcaaatcatctctaaaaaagtgtcactgtatgacagagaggcccgtaggcaatatcataaagtcctgacagactattaatgtcctggtgatttacaacagtgtgttgtcaagaagcaaccagcatatgaggggttgcaggctaggggtgtggcctctgatgaaacccagatctgagttgactagcactgaaaaaaaaagagcagaaggctacaacaaagacagttccttgctccttcctctgtcctaggctgagggcagccatctctggaaagctcaccctgggagggatttcctcatgtgcaactggcttcattcacctgaatttaacattaatcccagggcaggattaatgatttcttctgttgactactatgcacaatggggaagtttttcttttccagagctgaaatgaaaggcttattgtgtttaaataactgaaatgcttaattaccatagcattgttttaaaagatatatttggtgtaggcatgttgactaagaaatgagtgaaaaaccagcatagacgtttatgcacagatcaatttatcttaatatatttgtgtaagccatcaccacaagtggtgctgtgagcagagagacacagactaattacagtgaaaatcaaacataatttcaacataatttatgttctgaattaaacaaggacttttggcaataaagagaaaaaataattatgtgactaacataagctaaaaggatgtaggtggttcatgggcatggcggaaaactgaacagctcttgtgaaggatgtgttcagcttttgtaaataagcagaggacttctatagggcatagctatcagggtaaattaactacaactctgtcagatactttagtcaaattcaagatccatacacctaggagtgatattacaaaatagtttttatctgggccctatgtttaccacttacccaagtcaaaaataccttataatcactataccaggattctgtagaattctgtagataactctagaagttggctatcttggggccggacacaatgaactatgtacttgattttctttgtagctaggtaggtaacctatgactcagttctggacaatagaatggagcaaaaatgacgtttgctactacaagttgtgtgtgtggaagtgtttacgaatcctgcagaagctattcctgccttttcatctctagagaatgctgtgttcatagactcagtggcctttgtcacatgagctctactactgtacacagacacaaggtaagataaaaactttaatgatttgaagtcattaagatctaggggttcttttttttcagaagttaagctacctcaattcataaggacctatattggaagatacctcctccttcaagcttggtgcaaaagttatcaataaaatacttgtgaactaaatccaagagcacatcacaaagatcatctaccctaatcaaataggcttcatcctagagatacagggatggctcaacatatataaatcaacaaatgtagcccacaatgtaaataaactgaaagacaaaaacttcatgttcatctctttagatggataaagggcctttgacaaaatccaataccctttcatgataaaagtcatggaaacattagggatacaaaggacatacctcaacataataaaagcagttttcagcaagcccacagccaacatcaatttaaaggagagaaactcaaaccaattctattaaattcatgaaaaagaggttgtccactctctccatacctattaaatatagtgcttgaagtcttaactagagcaatgagacaattgaaggaaaccaaaggagggcaaattggaaagaaagaagttaaagtatcttcatttgcatttgatatgttagcatacataaatgactccaaaacttccaccaggaaattcttatagctgataaacactttcatcaatatagcaagatacaaaattaacttacaaaacccagtaaccttcctacataaaaatgacagactaagaaagaaatcagggaaacaatatgtttcacaagagcctcaaataatattggggtaactttaaccaagcaagtgaaagacttgtataataagaactttaagacagtgaagaaagacatcgaagatgtcagaagatggaaaggtgtcctatgctcatggaacagtaggattcatatgataaaaaagaccaacctactaaaagcaatctactgactcaaaacaaccccaccaaaattccaacacaattcttcacagatcttgagaagacaattttcagcttcatgtagacacacacacacacacacacacacacacacacacacacacacacacacacacacacacaccagtacaattctaacagtcttgataataaaagaactgctggagttatcaccatcatcaactttaaactatcctgcagagctatagtactaaaaacagcatggtagtggcgcaatagcatagatagtgaaggggttatatatgcaatgtatttatcctgtttcatcttttcacacagctgctctcacgtcatatcctctgacgttctcaggaccttcctctagtcctagctcactcacctcttctgcttgagcttcctctttctttcttggtctgcatcacaaagtttcaaagaattagcaggaaaaacagaacttttccagagagagggagaaagatgaaatctaaagcatcagaggaagggaagggaaaagtctgggaaaattcaaaacattaataatgataatatagtatttgtggcagttgaaacttgaaagacacttggatgttaagcaatatatagttggctaaattttcatggtggttactggctacattcacaaaactggcttaatctctataatcctggagcatatagcctaaaaggaggagtattttatagtcagcaataaaaatgagttacagaaatatagcaaataatgcaaaaaagaaaactgatgccaccgtttcgtttcttggatgtgagttttaacatttaatggctgagccacctctccactatgcatgcaatagttttgagtgggggaacttagctttaagtaagaaatagtgtggtgacataattgcagttttgaaacttttatgtatatatgtcgttgtaaatgtttgtatgattggtaagaatggttatctctggactggatattgtcactacaggggatttatttccttttttgactcttctatagtttgaaaatgttagtaagaatatgttcaacagtgagggtgggtaacaggctattcctgcagggagcaggcgatgtcttgagtcagagtgtgttgttgacttggaaatatctgtgccaaagatcccaatgcttcaggtctgccagaatagcaaagccttccccaggtgaggctctgagggatggcgatgccttccttaggtctttgtagaaatgttgacagtgtatggagaaatgtccactctagctttcttctccagggtgtttacagcctgaaggtgttcccttccagagaatgctcctactgagtttagtcaagcccacttccatattcagctgaatacactaacttgcttccttgttaatttttatgcaataccccaacctccttcttcagctttatgcagcaacgctgccttcctgttcaactgtctacaataaacacactgagcttccgtggtgttgttgcttctccatcagagagcccagatcactcccagcttctctctgtcagttgtatcgtcatttcttcatttctttcactgtcctagctagcccaattcctggagccatgaaagatacaatggcatattctctattatttgtcacactttatagatgtcagtagatggttgattagagaaacataccagttcacagtatttgctgtcaccctgagttgagaggccatctggggagcagcttcctcacttggtccatctctgtctcatacagtcctgtggagccaaatttgcttgtttctaatgaagtgcctacccagtccagtatacttgcttttcttttcggtacgtttcagtggttacataacacacacacacacacacacacacacacacacacacactaactggaatctcacagcagctttgcttattcctacagcacacttcacctaggcttatgtctactgtgttaccacagactctagccatgtggcgctgacccaccctttataatggaagcaccaagatttctgtctgatgacaatgaagcaagctcacatgcttgcacatagaaatgaatagtgcttggtgactctgttaaaatttatttagcaagttttgtgtgctattttcttaaacataaacctatagaatattaaaatacattttatgttgttttaaaatatttttgattaatataatacaaagcaattaaaggctaattctaggacatgtccctctagtcaaactaccaagtaccagtgaaaggagtgaatgaatttatcataggtgatttcaatttagattattaaaactttccatagacataggagtcagagttgattaaactttaaacttaattgagtgaagtatttattatatgatggttgaaaagtacaggaaagtacttcagctgattggataattatgaataaataaatagggaaggatataacctagaaaatgtatttaaattattttaatgattgctatatggaaaatataggaaattataattgtcttgatattgtagcaaacctacaagattaaagctttgaagttgaataatttcatgctgtgtatacagccatgaattagactttatttagaatttagaattatttttgagatattatttaaagatacaattgtgaaattttaatagaaaatgggcaatttaaacatttttggcaaaattttttaggtgattttttagaaatggttcctagcaaaggtgtcattaagtgcctatatgagtccatattctgttgctattacaaaatgactgaaacagggtagtcttataaagaaagcaattttatttagctcttcatttcaggaggttcaatgcatgaggccagcatcaattcaggtctggtgctgactccagagctgatgatatcacaaatatggaggtataagtggtaggaaaagatcacatgtccagaaaggaagccagagaaaggggaggtagttgtagctgttccctttataacaactcttaagaactgaccaagggcccacaagagctacttgaattccttctaaggttagcaccatcagtaatggggagctgtttcaataggtccacaccacttccaaacactgtcacactagactaagtcttcaacatgtgaacccttgaaggcacattcaaaccatatctagtcagcaacagcactctcaaatgacctcagggaacatactatataccttttggttcatttagtggctgcttgttttgctctgtcacagaggggaattgtcacattaattcaattattggatttaggaggccaatggagaacctggtacttcctgggtacttggcatggtgctcattgcttcatggctgttgcaagaacaacagagaaaattgcaaaagcaatttttacaagagctatatgaatttcctgattaatggagtcctaccttatgtagatgtcaagttctagtgcctgtacataaaaagaaaattatttccagtctgaactactcttaaaatccttgaaattcactacaaaataaacagtgtcatgcactcaactacgtaaaccaattacaagcagcaagtactgtgagcccagcagaataatgagtttcctgcctcaaagtaaggtgccagaattcgttgactccccatgggaatgaatggggaatgaataggggggcagtgtttggggagggaggaaggagtagcaggaggaggggagggagtgggaacttggattgatatataaaatgagaaaagattgcttttaaaataaaaaagtagggctactgagcaggatgagagataccatatcagagggagccactataggtctgagaagagatttggaaccagggagatctccagagaccgacaagaatgacacacatgatctgacaatgcaggcaatggtggagaggataacctaaaagccattcccctaaaatgagattgatgacttctctttatgccatcctagagccctcacccagtggctgatggaagcagagacagacatccacagatatacactgagccgaaatcgggaatttagttgaagagagggaggaatgaagagcgaaggggtctttaccaggttggagaaacccacaggaacagttggcctgaacaagggagagcacatggaccccagatgctatcgaggaggccagtacaagactgatccagacccctgaacatggatgtcaataaggaggcctctgcactccagggagcctctggtagtggattagtatttttccctggtgcaagaagggactttgagagcccatcccacgtgaagggttacactctggccctggacacatggggaagggcccaggaccagcacaggaagatttggtggactttgcagagcccccgttgagggccctaccctgcctggggagtggtgggtggatggggtggggggtaggctgggggtgggggaggagggttgggggtgaggggagggagaaggagaagggacttgaaacaagcttgttccctaactagaactaataaataaattataaaaaaagtaataaaaaagagtttaaacacaaatgaagatgttcaagagattggagatgggtagagagaaagcacagggatgataaactttctgtcactataataaaatgcctgagacaatcagctgaaaggagaaaagtattttggcttatagctttagaggttacacacctcatgtctggggagcaaaaaggagaaaggaaatggaaagtgatgggcatgttgcccagtgacctttagccctcccatgaggctctgcatcttaaaggttctatcccatgccaacagtgtcattctgggtcatacttatatcatgacatatgttcgtctggagctttttattccattttctctgttaagttgtgtcaaaggcaataaaggaaaagaagaaaatgatgtgtgagcaaacattttcatgcttaaggaaacaataaagtggccatatttccagcctctaatcacctcaaattgtaattttaggacaaaggaaggtgaacctaagagcagaggctgcagagtcctctcataccttagacatctactataattcttgagatcttgatgatttgtgctgctgtgtcagggacccaggtgactggagaatgtccctggagaagatagtcctaagagtgtggctctcctttaaacaagcttttgcctcccatagtttctgttttctgaagtaaaattcagttcaaaaatagtaaatggaaaactacagaattcccatgtttgaagcatctgttatttaactatcttgctatgattattgtactttactattagtgattgttaatcctttcctgtgctaattctcaaatttgaccatccatacgtgggtaaatgacaaacactgcatatgtgtacaacttgacattacatgcggtatctggcattcaccgatggctcttgaagagagttagggaaaagaactgttattttgcaatcacagggatggcatctctaagacagacctttgctgacagtttatttattgtctcaggtccaactgactagtgtaggatgaaagagaaatgtgatgtgatgttcactcactttcctttggtctcacgtgcactaagtcacaagggcagatgagattcctccacctgtgaacttgccctctggcagatggcagctacacaattcctctaccctttagaatctagataatgaatactgtgctcttcttctcttgctatgaatccactgtgacttccttatccttagcaagagggggtgccatggaaagagcagaggaatcaaggctgccatgtgaatcctggctctactttggtcttttctgtgtaagtacagaacatgtgagtcatggggatgattgtgggcaatcagagcttaattgattgactagggacacagattggtcaggaaagtctgtcttactcaaatttatatcctaatattagaatttttcatacaattaactttgtctcctgcataattttaaacatgagtcatcactgattttctttctcccaagcactcttttcagttatgaatcttttgattctaactaattttgcccttgtttatctctggcttaattatttgccaactgtcttcattacccttttggtgaggaggaagaaatactccacagtgacgctgaatgacatcagcattgagcagaagtgtcacttctacttttgtccccatgggaagctggaaaagaggtccctgtttctagtagagatgagtctgctgtatatatttcaattttttaaaacatatgttttgttagaaaggagcacaattctgtagtggatgaagttgtccaaataattgtttccttttattcagattaaatcaatgcttatgttgatacaagagtcaggagcccacagcataggtaatggtagcagcagtagatttggggaaactggccacaattatagactggcactcctacatttttcttaggtaatagttggctccattaaaagagagatcactgtttttattttgaaacacatttttttaaaaaaatatgtatcacaatatgaaactcccaaacactaaagagtacataaaaataaatctgcatctttaaagatgttacattgttttctcaaagacagagagagcccaataggttttgatgaaaaaaaataatactccaagagaaagatgaatatagcaccaatagaaattaggggagaaacagggaaggaaaatcaatacagacacaagcataagcaacaaaaaagaattgtaagaactctggcatctctgccaggttggggtgatgaaaagcatgaggaatcacaaaagcagaatgaaaaagacaaaatatttaacatgcaaaaactaatcaatctgaagacagaaagtagaaagcatactcagcacaagtataattggccacaaagaagagtcagtgtatggaacaggaaacacactagagaatggtctccaaacatttaaggaatctttatgagcaactacactgcaactttagatatagggggaaagatccaaacaaaatagaaggtaacttccccaaactaaataaaagcacaaaatttctgatgaaaagacagtttatcatgggaagaaaaaaaattggcagatagaaacaaatggccattaagctatatccagggcaagataacgaatgtcaagaaggaaaattaagaggtcatcaaatgaaaagtttatagatgaaaaaaatgtttttcaagtttcttaatagctctactcatcaactgaagacaaacaccagtagcaacgagtagataaaggggacttactgaatcatactgggaaaatgtacttgacatctcagacatcaaaggataaatgatgaggacatgatgtgtataatgtagaactcatggaaacacagtcgggaaaacaatgggaaattatgtctcaagaccagactgtgctatgaaacttaaaaatgtaaaatggttgtctggaaaacatttttgtgacctgaggagagggtggaagaatgaagaacaagggctcatctctatatcgccaagacaggctactaaataagttgtgttaaacaggtcatggaagtgttccatgtacagttaaaagaataaccctatgtctttgttctggggatatttacataaatgaatcttttcgtgtgtaactatgtgtgcagtgtaagtgtgaacgcatgcagacatgcatgtgtgcaaggtttgtgaggatgaatctctgtggatgtggaggcctgaggtcaaggtctggcgttttccttaatcattctctaccctgctctctgggacatggtcttcattgaacctggattgagctagcctggctaatcagtgacttgcaggctatttatctgcccctcagtgctgagttacagttttgaacctactagtggttttattttgttcttatgtgggggtcagggatccattagcttctcaggcttccacagcatgcaccttaccaaacaactgtcttctcagtcccatcaatgaatatagcttatagaattatttttagttgctctgcaataacttctaataattaaaaattggaagattgccagtttctcaagacatagacatttttcagttaatgaaaattgatttttgttatataatatatcttggttatgttttcccatccctctactcaccctccttccctatctggatcaaccccctttctgtcttatctttataaaaagaaacaggcatctaagagataataataaaataaaatatattataataagatacagccaaaacaaacacatcagaataaaacaagacaaacaaataaaaggaaaagagcccaagaaaggcacaagaatcagatacagatgtagagacccactcatccacacactcaggaatctcataatagcacaaaactgcaatccatagtacattagtacataaaggaccttcagggtaagaaaagataaataaaaatatgaaattaaaaagaaacatctctgatttattatgagacaaggaacctcccaagatgccattgagtttattttctgttaatatccaatgctgggcatgtaacctaccctaagaatactttgtttccctagtgaaattcccttggaaaaaaactaaataattatttgcaagtggttatcaattggagatagcttttgggttagggatgggtacatgtgttcacttctccctttagctctaagtccccatctggtgcagattcatgcagggcctgtgcaggctgcttcagtctctgtaaatcagtatgtgtgtcaaccctattgatttagctggctttgttttcatggtgtcttttatcctatcctaaaatatatcaaatactataaatctattttgcaaaaatctgttatctggactgggaatacagcttagtttcataattcaggcattgggaaggaggagtcaaaggcatcctggggcccccttaccagtttattttgaccaatgagttccaagtcaaggctctttttccaaaaataaagtgagcagcattaacttctggccttcacacatacaataaaaaaatcatgaaaagtatattacctatctatttatctatccatctatttttctacaatctaccactagtcatctctctgtatacatgcatactctgtgtggtttatttctacatatatacatatttgtacagctatatgcaattgtatatgaatattgtgtgtgtgaacatatatatttctagactgattactctgaattaactgggataatgtattatcccatgtatttgcaatatgttacaatgttcagtaggtaagatttagttttaatatttttttactgtactttactattttctattggtagaagacttttgtgagaatgtatagtttttataaaaataataatcaatttttattcaccacacacaaatcgagacgataaattctttactagtgccattagctagagactcagaccctcacaggaactagcaaagctgaggaaccaaggtctcctgttttctctcttccatttcatttgttctacatctctgctgatatcccctttgctctcattaatcttcaggctactgttctagaagagtctgactcctactaggaaggaaatgtctgctcctccctgtcagcctccaaatccttggttttctgtatctacactgttacctcctccttctttgctattgttctgcttctctcttgttctttcccattagttttgggctccatgatctgaccttgtaacatttccttttctttggtcaatcatctggtgtcaacccactcaccacacactttttatttttaaaaattatttaaaatttaattttaattaaatttccctagaaaggcagattgtgtgctctcagagctgtctctcacaaacactgctcatcttggctccctgaggtagtcaaaaaacatctttggtagaagttaaggtcctgggcactgggaagaaaggcagtgagttgtccagtaacagtggaaaattaatatctgtcagcaaaagtagcagaagatatcctttatcaaatctgtttcccatgattatatgcctcatagaagtttctctgcttttcacttttttaattcaggctcctagtttgctactggtccctttctattattttttaggattttctagtggatattttcacatacaaccatagttactgtaaccccactggttttctggactcttattagggattgttgctcaagaagttccctgaagtgaggatttcctcagaattgctgatgtctttgtgtgaacatttcctggagagcccctgaaacagctgccaaacatcctgaatccagatgcagatactctccaaggaagagaaaacaagattcaaggctgccaacatgctgctcattcccctactttttctacttaggcatttttgcaaaagtcacttggtcttctataaaaacaatcaattaggcaagtacattattttattgcagacaaacctgggttgagggttgtatcagtcagggttctctagaggaacagtacatgagagttgtataaatattagaatagggcatttattaaaatggcatataagtgatacaggtccggtagctcaacattgggtggtagcactctggagaagggagcaactggtgattgtttctcagctgaagcctaggaaggttcttagaaacactggctttcagtccatagcagaaagctggagatgctagaataagatgtcactgaaagatgtctacagcagcaaaggctgcatatttgctttctagaaagaggtgaagtcaggcaagcaaacagcactttctccttggacctccctataccctggcgacatgctggaaggtactgctcactatggggtctttctcccacagctcacccttcctggaaatagcttcatgggcacaactcagacatgcctctgagttgattccagatctcctcgatcgagttgacaattgagattaattgtcactagaactctacctattctcccatgaaattgtgtacccctgtgttccagttctctgtgcctgaatgattttaaacaaagtgaagcattggagattagacctaactcttgtaaaataatctatgacaacatttgatttacacagcttgaaataatagatatcccattctgattgcttaaaagtatgatgactactgatgtgtaagtgatatgaaaaatgaaatatatacaacagagatcttggtttattatagttactcatagttcttgccattgtatgcatttaaccatgtgcataattagtggacaatcatagctttattttctatgatgtccaaatttcactttgattattaaaacattttcttggctgagagagggtgcacatgcacatgcagaataggacatctaagaagaaaatgtaggcaaagcattcctggatctaatgctcctcctagaaacgaatcaagcagaaggcctcaaccttctagattatatagacgatgtgacaaaggccaatactggaccaatgaatgtaaattgactagagacaagcaaggaatcatgttacaatcaggaaactccttgggggggacctctcgaaggcccccatcagtaggtcaggtccactgtttctgtaggtcattcctagtcactgtggaagacaatctctcccaggacaattaggctggagaaacctacagaaacagtggacctgacctactgatagcatggagaccttagtcataaagctggggaaacagcattggactgatccaagtcctctgaatgtggggaccagctaggaggtcaagacagtctatgggacctctaacagtggagccaatctttatccctagagcacaaatggactttgggagcccattccccatggagggatactactgcagcccagatacagcaaggagggcctacgccctcccccaaatgatatgatggactttgaaggtccctgggggagggtctcgctatccctggggaggagttgggggatgggttggggggttggtggggaacatgggcggatgggagggcaaggaaatggggatggatatgtaaatatgactagtaattaaagaattaaaaataaataaataaataaataactccacaaaaaatccaataacccaatttaagatcacctaggagatgggggcacactgtgagtatgtctttcagaacattccagaaagaacttggagggaaagagtcaccctgaaagtgggtggcatgaccctcccagggcttggacagattaaaagggcaacactgtgagaaagcatcagcattcctctacctctatcctcaggtccaccatgatgtatgttgttctcctctgctccactacaccacagtcatgaactgacacttctgaaaccctgagctgaaataattcttcctcctgaaaaaaaaaaaaaaaagaaaatccactgcctattgtaaagaataataccgctctggatggtagattagctaatgaggatgaatcaaatgtaactggaggaaacaaaaaaatgtatattttggcaaacttctataaaggatcagaggcctaaattaaaagttaaaatgaataacaaagtgatagttggcatattggacactgattgtttagggttgggtttggaaggagatgttcagacttggacatgtctttcagaatagtttcgggttcagatgggatacatatggttagatgattatcttagtgattatttagctatagacaacttacattgttatagaatctcatatgatgtaactcatgtaggatcaagttgtattcctttcttggataatttgtacatcacaatttgtcttactgtgtaaggtcttctttctacttacaatgtttggtgcataaatatccttatcatcttctatgtacatatgactttatgtatgtttaagacattttgtatattgacacaatttagttttgtttcatgtctaaatcttttctttagactaaaagcagaatagtacctgtaccactgaccacgacagtttgggtttggtcacaggtatgtagaaggcatatggaataactggctgagggagggggcaatgctctcttttgggattctagtcaggtctggaaaggctgcagagactaacctgggttttggtgtaagtaatttcccacaataaataaccaacatcattcttattctgtgtcctgatataatttctcttgggcatgctaccctgggttgacaggtagtttttccacactgtgaagatagtaccatgctaccaatcacttagtgatgctccccagtaattaagtaagttagtatgtcattatttacatagaatttgcattgaatgtattaagcattttaagtagtctagaaatgatttaatgtatacaggagaatgtgtgttatatgcaaatacaaaaccattctataaaaatgacttgatctgcaaattttattattcttgggaggtcatggaaataattctccaccagtacataaggatgaccatgtaaagcaatctttgttcaccttatttgggaacaaatgactgatccatgaaacacatatttatttatcatatattatataccaggcaagtgttataaatataacaagtgaacaaatattatcacagggattacattttcaaagggaaaagagaagagatggtgggcaaaaattttaaaagggaaagaagtgagtattgttatgtatgtagtgtataaaatgaaaagttactcaacctctttcaaaaggggtactgccatttgtaatgcatggactatcctgaagaatgttatgtaaatgaagtaaagcagacacagaaaaatatatatacagctgctctcattgagatggaaacaatagaactgtggatacccaaagtgagagggagatgttggtcaaagagtatgaacttcctgttgtgaacaagtcctagatacatactgagtagcatggtgactattgttaatagtaatcatcagtatttgaatacagtttgtaccaattctatctccattgtgagatataaagtgagtagaaacagcctgactatggcttttagaattggcacctcttaggatccttttaggattatataaggtcatcaaaatgggacccccccataatcaaatgttgatggtagcttggtaaaaggaaggagaaagatgagaaggcaggtgcacatgcacttgtacacacacacacacacacacacacacacacagagacacacacacacagagacacacacacagagacacagacacagacacagacacagacacagacacacacacacacacacacacacacacacacacacacacacacacacacacacaccacatggtttcatgccatggaagacataaatctgtggttcttaactttcctaatgctgtggcctttcaatacagtttttcatttgtggtgattcccccaaattgcaaaattacttcgttgctactttataactgtaagttttctgttgctgtgtgtcataatgtaactctctgatacgcatgatatctgatatgtgacccccaaaggagttgtgacctacaagttgagaaccattgctctaatatcatcttgagattctggcagtaagaataccattactggatgggaacactcaacaatgaatcagaaccactagctaaaataaattaactttcttcataacttcctccatatgctgtaataccactaacaaaatcaagcatgaatattaatgcaatgtattcctgaaacttactaagtggataagtttcagctgctgtgtttacaacttagcacacacacaaacgttaaccaaactaggattttaatagcaattaatagcatatgtagatccatgtcttagttattttctcattgttgtgacacaatactctgacaaaagcaacttaaaagtcagggcttaatttggctggtagctccatggggtggcatggaagctggcaagaaaggaacggctatggagctgaaggctgactgcttgcatttgcacccaggaagcagcagaagtcaggtgggtctacaaaggctcacggtctgctccttcagcaatgcttctccctctcaaagatctcacaaacttcccaaacagcaccaccatctagggacagcatgtgagcaaaaagcacatacaaaagcctatcatggtgatctacgaatacagcttagtggtagagggtgtgagatccttagtgcaatcattatacacacacacacacacacacacacacacacacacacacacacacccaacaaagcaaacatcactgatgatgtgcaccttcacagtgtggatagttttacttgacaatattctttaataaaaccagaatatttaaatgaatagtttctgtgttttcataggctaaacatttactaaaattgcatttctaaattgcaacaaaaacaaaatcagtcacccttctggaaatctcccctaaagaatagagatgtaaaaaaagttatgcaaatcacaattgcaggtactaataatgaaaaaattccaaactactaagaaatgggaattaaattggactgggaaaatggcttagtaggcagaatgctttctttgaaagtttaagaaccggcttgtatcccaggttatgtaaaaatgaataaatacttatttatttaaaactataggttcagtgagagacactatcctaaaaataaggtggaaagtgatagagaaagatgccaggtgttggccgtccccctctgcatgtgtgtgctcgggcacacatctgccactcccatatgtgcataatatatcacacacatgtaaaggaataaagaaaaattaaatggcttccagaatttttgtgtgtataaatcatgttttagtactttagcacgacaggaaattatttctactatgattgaaaacaaaaaaacaaaacaaacgaacaaaaaagcaaccagctaaacaaacaaaaaaaccaaccaatcaaccaaccaaccaaccaaccaaccaaccaaaaaacccaagcaagcaagcaaccaaacaaacaaaaaaccccaagcaagtaactaaccaaacaaacaaaaaaccaacccccaaaaaaccctaagtaaggtacaaaacatatagagcataatctctattctctaaaatccagaaccaagttgcagcagaaaatggttcacataagcttaatacagtgtgactttataccagaagaatctaaggattactagcaggttatattaaactttcccttgtgcttttcttgtgaattttgatttgaaaaagtgaaagtttctgtgattttcttttgttagtaatgttaagcattgagaagacctctgccctcttgtttttaaatctgtatctgcttttctgtgtagggcttcaatagctaatgttccgaagcatttctgagtttagcaccctgaaatgggtgtagtaggaacactcaaaaacatgctaatagacgacttagttttatttggctgtaggatttgtcttgtgagttttgtttgtgcaatgatggcgtatttctcaattctttagacaatgtgcctcaaaactcattgaaaggaacacatacccatgagttacagggagcctgtggtaccccctttctgtatataagccttcaaatgtaacagcgttcctccattctccctctttggggaagttaactcccgatggaatactagtaagcactgtcaacagctgaacagtgggagcccaggacagatttagaacagcataggaggtacctgaaaagagatttcaagagcacctgttaattaaaggagttgggagtgctgttatgcagatgggagccacgagcatccttatctccatgcacacaagctcatggaagagcagagaaaaactgaagcatagcaaaccctctgtatcacacaggaaaatggttgttaaatttgccgtactgatgcgggggagtgattccagaggcttgaaatgttttactgtttaatttaatccagagaaaaacacttagtattgttcatttctgatttaaaaatcagctcttaaggacactacaactgtattgatgctaatggaaccactctgtataccacaagtagacagaaatataaatacgctgtttgctttaaagaacaaaggtgttgggaggactcccaagaatagttagatttttaacaagtgaaaaatgcagcaaaaatccccactaagatcattcatcttaattttgcaaggatattccagaatttcaccaagaaaacccaaatttcaaagaagataagttatttatttatttatttgtttatttatttttggtttttcgagacagggtttctctgtattgctttggagtctgtcctggaactcgctctgtagaccaggctggccttgaactcacagagatccgtctgcctctgcctcccgagtgctgggattaaaggcatgctccaccaacgcccggctagaaagataaattattaaaataggtttcttataactagcttaaggaaacaccactatcaatagagaaaggctagttggaacgctgtgtgtgtctactaattaggcaagggtaatatcacacacagacacatcatatgaatgaaaataaatgaaaaaatttaatacagcatgttcaattccactgtatttttcttattcatgctaatagtatccattagggtagcatgtttttcttttcaaaatttccaaatgtggttataggaaaactagttaaacattcatattaatccccaacttaaaaatttgatctgctattctatccaagaattcttgtcagaaaggtatgcccttgttaatttttttattctatagatacaaacaagcataaaacttattttttgtgtgtgcattcacagaggatttttttcttaagtcctcagatatgtcctttattgacatttggagactattttcaaagtaaaaatgtgatgggaacaaaaggtcatagtatccaaagcatttctgttatcaatgtctagaataatgagtaaaagaagcaggtggtctactttctcatggcctcccagagtacctgggtgggagagttaacagtggtgagtgcttactccagcaccaatggacagttccaaactcatggtcacacagacagacccactggctaacacaacaaagtgaaaatatgaacatgggaaaggaatttgtatggaggaggggaagattactgtggtggaaggaagacaggagaggatgggaggtggtaagcataatcgaaatgccttatcacaagtatttgaattgtcaagaaagattaataaaaattatgaaaagaagcattgcttgataggtattcattaaactggtgaggaaactcacaaggtacctgtttcaagtaactattcttcatgaccacccaaggactgggtgaccttaagtgaaaacctgtagggaaaaacaagtgtcacctcaagtctccaaatttatggactttgagtttaaagtcatttcagtggaggcttgtactgaaaacaggcagtgacaagtaaggaaagaacttcatatgaacttcaagtatttcatattttatttagtgatacctagatgaacaatagcctttgctacaggccattttctcgtggagatgtgaatcacctgtcattggaaacctttgcttgcttactagcaaaggttgtgaccataatctggagaccccctctcaggagaggtaagacagccacttgagtcagatggttggactttattattcttgtttatatggagtagttctgctctggtggacttactaaacaatctggaagctgtcccttgggtgaggctgagatagaggttggcttagttaaaagcttaaatatttcaaagaggtaaatgttacctacttcgagaaacaaaagcagatctcataaaaagtattcataaagaaatgagctgtctgttgattctcaacagaggaatctaaaatgtctgaaagacacataagaaagtgctcaaaacccttagctaccagggaaatgcaaatcaaaacaactctgagttaccatcttacacccaccagaatggctaaaataaaaaacaccaatgacagtctatgctggagaggatgtggagaaaaaggaacagtcctccactgctggtgggagtgtgaacttgtaagaccactttggaaatcagtatggcgatttctcaggaaaatgggaatcagtctacttcaagttccagcaattactgtcttgggcatatacccaaagaatgcacattcatacaacaagggcatatgttcaactatgttcatagcagcattgtttgtaatagccagaacctggaagcaacctagatgcccctcaactgaagaatggatggagagaatgtggtacatttacacaatggagtattactcagtggagaaaagcaatggaatcttgaaattcaacaggcaaatagatagaactagaagaaaccatcctgagtgaggtaaaccagtcacaaaaagacaaacatggtatgtactcactcatatatgaattttagacatagagcaaaggattaccagcctacaatccttatcaccaaaggaactaggaaataagaaggacgctaagagaaaaatgcatggtccccggagaatgggaaggggtaggatctcctgagctaattgggagcatgagggtagggaagagggagctgggagaatgacagggggagaagaggaggggagaggaggaaagggaggagcaggaaggttgaaagaatagaggagagcaggatgagagataccataacagagggatccattataggttcgaggagatatctggctctagggagatttccagagatctacaaggatgacaccaactgacagtctaggcaacggtgaagaggctaccctaaatgcccttcccctataatgaaactgatgattgtcttatatgccatcctagagccctcatccagtggctgatggaagcagaggcagacacccacagcgaaacactgaactgaactctggaccccagttgcagagagggaggagtgaagagcaaagaggtggggaccaggctggtgaaacccacagaaacagctgacctgaacaaggggaagcacatggactcttgactgatgtgtgggaggccagcaagagactgatccagacccctgaacgtggatgtcaatgaggaggccccggcactctatggggcccctggtagtggatcagtatttatccctggcttaagaagggactttgggaggccatcccacatggctggatgctctctcagcctgaacacatgggggagggcctaggcccagcccaggatgatatgacagactttggggaaaccccatggagggccttacccttcctggggagcagagggggggtgaggtaggggactagtggggggctgggggaggggagggagagggagaagggattgacatgtgaagcagccttgtttctaatttgaactaataaaaataatctcttggggaaaaatgagctgtcttactagatatgagttcatacttcttctgaagtcccaaatttgcccaactgtgggaattctgcagacctctaagctttttcatcttatatgtccatgagcccctgggaaatgatcagatgttacagtaactggaaataatgactgtgactccctttgccacatagttgatgctctgacagccttctttgctctgtagcttcatatatctttactactttccccaagatgggcatagccacctccaatacacacttgttccatggtccagggctttgtgaaggtttaaaggagttaccatctaaaggatgctaaatatggtccaaatttggtccctttgagtggctggctcatccagcttcaagtctcctctcagtgaagttgcttgctcaccgcttaaactctcacaatgtggggcccttaggtacctctctcatagttggactatacacactcaaactttataggtttttgcatgtctacatttctccattcccctctcttcaaggatgtctaggcaaagttacttcttaaaggaaaagagcacagtgataggactttccctgagggctccaaataagcactaacccagcttgctcaatctttaatgacataaagcatggactaaacagacctcagataggcatagtccagttttcatcttgcagttgggctgaggagtgtggcagcatcctacccaggcctctgtctgaagctaggttattcaccctgcctttgcaactgcaagactggatcactgaccctggggacacattgttttgcaacatgcattgttatcacagagtgagatgtgataaatccaaggaacggaggtgtctctagggatgacgtaagctgtggaaccctatgaagtttgcatttctaaacagatcttggcttccagtggagcagcttccatctgggtctacatttaggtctttctcccgagcttcatgtgggaatcacataagcagggcccactcacttcagtggcttttgctcagaactaaagtcacactttaaagaaaacctaagcttccacatttgaaaagacagactctgcatgtcacgtcgccagcttgaaaacaaaaccgtctataaaggagctgtgaaaaaagaccagccctcatatatatatcaggtacaaaaagtttaatgggtataaagtgggctttaccttgacaaccccaagccatttctaaaataatgaatgtgcataaaatatgggaacccaatgatgtaagtgtaggagtgtgatataaaaaccctgcctctgatcaggccacactatctgatgctacctttctcacagatatcaacaggtcccagagagtttgcctgggagttctacctaacaaacttccagacaccatgattcctcacctgggaaatgaattaacgtgaaaggggggtattagtcatatatcctgttccacatccccttccggtgattcctatctgggaatcagatggtgacccttgcatgctgtctgtgtctggtacggaatctgaactctccttggagccgctgccatactgtcacaggctctgtttgtctgttcatgtgaggcttctaacgactctttacttcctagccaaaaaaatctgcgtgtgacaataaccaagttggtttgtaactgaagtgtaactagaaacatcagtggaatagtactcgacgattacaaacaggcctgcacataaattggaatttgatatacagataatatttgaaatccatgaaacaaaattatagtagcagcaaattatatttgggcagctaaaaattagggagaacttttcgctagcttgtagcacatgtcttcatttcaaaacagattatcatagactaaaacggccatacttaaaataattaagttataaaagtaatagaaaaatactagtcattgacaaaagtttgatgaagtctatgatgtttcatagacaacacagaagttataaaatagaagacaaacttgatttgaactcagtctgaaacatacaaaagctccactattaaagtaatatggaaaacaaagccaaaaaatcctataggacaaagaaggaaaaaatgaaagtgaatatagcatagtataatttcatatatgtagtctaacaaatcaagaacaataaataaacaataccaaaacaagcaaaggatccaaacagtaacttataatggaaattgtatgtctttgtttgtgaataaataggacattataaagctaaactttgaatttatattgataggtagattcataattttatttataattagtgaaaataaaatacaaaaatgaaatatgattttttttacacattggtgagcaataggtgctggaaagaatgtgaagaaacagcttccttctatgcattttttattgagggacaactgacattgtctattaaaagtgacaatgtgactacttagcctgcttctcgcttttgagttatactctcctagctacccaaagatgaatgcgcaaataactgtaacaaggcacataacaaccagaaactgagtcacctaatggtcacttagggaggactcattaaattacagcctgaccaaacacaatttagtccctgaaaaagaacaaattagatctgggtgtactgccatggaaaactgttcaaatacacagagtataaaatgcaagtgtcaagagtagtatgttttgtatgactcctgtctgaattaaaaaataccttaggtataaatgcatttgcatatgtcttaatcatgtccccaggtgaggtaaaatacactgttaagtgtagttatttgtggcaagggcacaaggacggaaatcagtactggggaagggatattttcttccatgatatatcactctatataactgaacatttctctctaactatatcatagctttacaaaacatggtatttaaccctagggagacccatgaggcatagaagtttagggcgagtgtttgctggtgactgaagtagcttgttggggcaaagggcatgtgtgttcatccggtccttcaagtggtaccacctttcctcttgccaccctaagcagggcagagcccacaaggaatctccccttcctataataaggaggatggtagcaagatcttggcagtatacggtttgaacttctttcatctagatctttggtcaggctcaatcttctttcttttctcttccactgcccacacccaccagatgatctccagcaattttccctccttgagggctctattgagagccagctctgtctgtctgtgtaccccaggactcaccatccttttgaacacagtgatggcagaagaaagagagtaggcactgtagcagaaattcaggcaaagctttatgcattcagaatgggttctgaaatgctaaaaatgcattccattgtcatcgctgtaagtgctcctgtacttctttagaaaacattcaagttgtttaaaggcaacagcttgagaattcctccgggtctgaaggaaaaactgaaaacctttgccacagatcacatctgttatgacaatggtaagaaagtaccgactgaaaggcctctgcagtttgacaactcttggatgtttttggctttcttccttccttccttcctcccttccttccttccttccttccttccttccttccttccttccttccttcctttctttcttttatcttttttgtttctttctttcttccttccttcattccttcctgtccccctcactcccttcctttcttttcttcctccaggaagccaggcatgatcttgatcctgtatcttgggtttttataactgcctgaagaggtagctgctgaatattctttctgctttattttcctttcttctaccctgagagaagcatttaggctctattttaatggtgtgtaaatgataggattcttgtgacaggatgggaggctaagaactctgagagtttcattattgacaagtcattgctctgcaggaaaagccactgaaagctgtttgacttttgtcctagtgaagaaggttctgtctacgagctccagtaggcagagaggtcactggctgcttcttgatggcacacctcactcccagagtgtgtccccaagaatcattttcaataggtgcagggatcttgtacttgatatgcagcaccccaagatggtagaaaaatgctattgtgtataaaccaaactctctctctctctttctctctcttctctctttcccctccctctccccttctctctttctctctctctctctctgtatgtgtgtttgtgtgtgcaagaaaaactgatcctactcctattccaaattatttttttctcagattttttatttgaattagaaacaggattgttttacatgacaatcccatttcccttctcccctgccacccccacaactaaaacgctacttatcacatatcctttttgctctcccttgatgttgaggccttccatagggtgtcatcagagtctattgtatcctttgggatagggcctaagcccacccccgtggaacatcaaagaaacctccatggttcagatgctagacttggaaagatgagattcccagtccttctcaatatgatgctgtaatacacccactcatatgcgcatgtagtacgtatgatgcatgtgtgaatgcatatatgtgtgtctgattctgaagatgtttgaacttcctgcaaataaattcagataaatcaatttttctctgtgtatttcagataagtgtgcatattttgcatacttaaaaggatataagctaattctaataaaattgtttataatcatctttgaaatcagtatttttcccaaaccagtgttattggtgataattacttattagaacagaatgattcataacatctggcttctcagtgagacccagacttcccttcttgatgggaagttctccaggaaggagcatccatatggaacatcgagaggaaattgatgaagcaacatgtttgaaatcccaggcacagaattctggggaatctgacaggaccatatgagcatcatttctattttatttctaaatgtaggtatgtctaacccatcacatctgccagttgtaggggaatggaaccaccgtgacatggagaaatactttaagaaggggtgaaatgattttcagcctaagatgacccaggaagcaactaaagctatgagctcaaactcagcatgtcacagaaaggaaagagagcagagctgcacagaaacagaaccttgtgcttcctgctcttagccatgcagctgaggtggagaactggcacaaggtggaaatgacctccggaatgtcctgtagtctgacaatcaaattaatctcagtagtcactgctgctcctgtgtgtctacaactgggaaaatccatgctgtacatatcaactgcccaatctgaaacacatcttggggattcatcataaaaattccacattttgacaatcatggaattgcttgtgcaatccaatgtgggtttatgcatttataaggactttaaagtatagtcctgagtgttgtagagaaacactgttattaaattagtgacaccatgaatatttttcttttaagtttcgactttctgtctgtgcccattgaagtatgtaagagtcagactggctgttttaaaaatgatggtttaaagtcttacaactgtctttttcaaattgctctcctcattttagcaaacccatggaggtgataaggtggcatctttctgaattaaatatcattctgttctgtagagtaaaaatgggctgagtgcagccaattatttccactcttgattgaaaattaagtgaagagtctgaagcactaatggctttgacattgctggtgttctattttcatttatgattaccaaacctatttatgagaatatgtaagacagatttggagaaagatccataaagtgggaaagttggcaaatgagtaaagaaaacttgcacttatgcaattggacaatctgaaattacaccataatgagaatacaatgaaatcattagaagtggaaactccacaattagaaagattctaatgctcctacctgttattgtatactaattgccacagctgatgttagatgcttgcctgttccagatgtgatagtgaagttttactctgtgtttcaggtaagtgtaagagatgtgagatggtagcatagactcccagagtttgaacccagatttaagggtttaacttgtgaactgctcatttatagataaaggaccttggttgtgccacaatatttccaattgatatctgtcttaactacttcatagaataggacaattgatggagattgagtgagagaacatgggcataaaatagtaaatatggagcctggcacatgttaatcttagtgcattctggtggtcaagtatgctagcctctagtacttgtggggtctaaacattggtgatgtttcctttcttttactcttgaatactacttacctcagaaccatattgctagcaaaggcaataatgattaaaaaattctcaaagctatcttttatattttatagttcatactactaagtaagtgtagatatttccagaaagtcatagtctctcagtgcagtcaccagaattcctgcctgtgacaaataatctaaaagtttcctgcaggtgttgttatttagaataacacacaaacctggaatctttagggtatgttaaagtcaagagctctcttcattaaagttatttggaaatgcagcttgagatcaacttaatgaggttctctggatagaggcaagctatgtatttgtagaaatcacataaactctttcatttagtaaaacatattcttcttgtaagaataagggttatcaatacactggggatgaaacccactgttgacaagatctcttagaagacatcataaattttctccatgagtgatctggtggacacagatcataagaacatttggtaattgcctaattaatatgattttatgctaaaaatgaggacttaaaaacacatgtagaatgaacatgagaatgatgtagagcttgttcccattccatactttacctccatttattaagcatttcctaagtgacagctgctaagtcatcacttttgatatattttaagatttattcttacactaactctggcatgcatccttatttggttttaaaattgagaaggctgaagtaaagagatgtttaaaattcatatgcaaaacaccaagtttatggtggccttcagatttaaattgattgaaaatgccaaatactgtaacaggactttgcatatcagtttgggggtatatgttttgggtgggtgaagaactttgtcttcaacctggtatcaaacggttgtattttagttaatgatttctgggacacataagatagatcgagaggtaatgaatctgagtatttcccctgcctgttgtattttgtgttgtgactctcccaatagagattttggaataaacttggataaaatggtctcacctgattccctcactagcaatggaaccataattacagaggtcatgtttgctatgaactattttgtcatcaaggtgtattcagtatctgctatctactgggaacacttatcaacatccatgacacagaatgaacaatataaacaaggacagggctctccttatcttccaattaatagtttgattctgaaagttccaaaagcatgctggattttttaagaggaaggagttaatttgaatccctccagtagatattttcaaaggcttgattgactttgtaggccactataaaaatctcatctacttcttgagttaatgtcagaaatactgagaagggattggcatggacatgtttctagccacagactcatcccggttggaggtagtgggataaaacaggctcagataccagattgctgttccacttgtgttgcttgtgacatgggttagtgtatttgtttttcactgaattcttagaatatcacagatataagtacaaatgggagacactaactattgtttacactgccatgggaagttagatacaggtgtttggaagctctctgctatacaaaaatgatcattgtacgacttttttttgagacatggtttctctgtgtagctttgtagaccaggctggtcttgaactcacagagatccacctgcctctgcttcctgagtgttgggattacaatggcattttttttgagttggtaaatcagtgtgggacagtatcaaaactgatgaccttttctccaaatcacaaacactgaagaagactctcctctagataaagaacttttcagctgtttcttcatctctgaggccagaaaaaggaccatcagaaaaaaaatactttaagatgcaagcactattcaatgatttaatttagctcagagactctggaactaaaatgcctgtgttgaaatgtttcattccagctcaactatcagaacttcgttggggagttacttaacctcattatatttaattttctcatctaaatatatagatggtaaaattgtgtctagctcatgatttcctatgaagagaatgaattaacgtgtgttagacatcagaaagataccttctacaccgtgaatgtctagcccatgttggtagcatagttcattgtgtttgatcatcttgacttttgactttaatacatcttcacaaatgactgtgggtcttttctatgaattgtatacttgtgatctagttccccccccttgatcaccaaaacatggtgagatgattccagatggaggatagagaaaatagaaaacaaaagtcacgtttgttgttccctacttccatcactaaatgcatcattactttacacattttagagtttggaattcttaattaatgtggcctcgttatcattggaaggaggtcaggaactaatacacgctaagcagctatacattttctttactgtgtctagtggaaactgaggccatttttttttaccttgaatttgcctaggatttaagtgaaacagttttgtttagaggatctaggtctctataattcatttgggtaaaaggttggcttagaattcacaagacaccagcccctagtgaagaagcaggagcagtgcataactgtatttaaaagccaccccctttctgaactgtgctcttaaatgttccaggggaaactaatgctgcaagcaattatttttgttattcacaggctagcaaaagtcaattgttgagcaaggaacttcttgggtttggagaggacaggtgtttctttaacttagccacttgggtcctatggtaggcagctttctgttgtgaaacaatccctagcaaacagtgacctagagaataaaggcttattttggctcatagattcagaggtgtttgtccaagttgtcactgggtccttttgctttagatctgtggtgaggcagaacatcatgggaggtgggcatagggtagagtggttaccacttaaaggccagcaagtagagaaagagaagaagcagggagtgccgctgtccctattgaaggtcatgctttactaatcactctcttctgaaagctccccaatttatgaaagttccactgtttcccatcagcaccacagactgaggccatgtgagcctctggggtacactttgaaaacaaactgcaacagtcccttagtaaggttttgagtagagatttcataatctcgtgaatgacagtttttttgggaaactccagtacttcagacatcttgggttttctctgaaggggtatggggccacagtaacattttccagatgtggtgacaaaagtttctgagaacagttctaatttaaagttgccggcaaacagctaggaaaaggcatctttctgaaacacatgtggtgcttctctttctgtgagaacataaacatttttccaagccaagtttctattaagtgataagatgtgctattttgatttaataacattgtctttaggattatcttcatataattacttagtctgtgactttagaccttgtctctatactttagcttccctatgtataaaatgggattagtaataagattgagtgcaagagcctattgtaagatttaactagattaatgtatgtaaaatgcttagaatagtattggctcacagtaagaaatctagaataattttcttttatggatgttgttgcatacatttatgtttactaaatactgtatttaggtaaccaaatataatattagtctggagctaataatcatcaaatatagaagcatactttatctcattttcccacactttttgtgcccaatggagaaacttaagcatacttaagcataacggttgtagatattgagggagagaaacatccaggtagggctgatttttttttgttttgaaagcaattaatctctggcaaatctgtcttacacacaaagggcaactctaacagaatgatttgttatctttgccagtatctcattttacccacacaactttagaaaagtatcagaaaacatgtccatgatgctacatatacagtttgggactttagatgtggaccttgggtctggaagttgctagcacaataaggatctatgaaaagcttgcctctgttgtgtatatagcagttttctcctattgttcctagagagacatggggttgcactgttctgccacatctgtcctcaaagaatgcttggcagacgaacacagtaagatagataaggaaacagccacgatgcctccagaataagcaaacagtgagctatattttgtttaatggaaacagaaggaagactattttcccctttacatcaaggattttatacaaagtgaccaagcatccttgctgtctctctgtctcaatagctttgaggtttctgcttctacaaagagtaacctcatgtaatgatagttagccctgtttttctcagcaaattgatgggagagcttgtaggttcaagataactttattcagataaataccagccaaacacaagccagagcatgccaggggcagccgagcagctaagccaaggagaagggtcaggagaagaggcttccatgccctctgtggtcccttaagagcccataccttgtcattatggcctcacctatagtcaggtgtagtcaagtacccctgtagctagcctctaaaaggaatggcttactgtcccctacagcaaactgattggaaagggaatgagacaaggggtcggccagccagcaggtgtctatgttttcagtattctctgctccctcctccacctggtactctggctatctctggattggtttctatgctgcatatattccaaaagacttatttatagggttctaggtccctctccctttccacagacttctgaaaacctcacattgaatgtcctcatggtcaactaagaaatattggaaaacactctaagaagggaccagaaacatggaactgtcacctcttaggataacttttctgcccatcatgatttggttgagaagattagaagaagacaatgatttttgagttgaggtgagaagagcaattatctgtcaggaaatacttaaagcaacagagctataatgtagtttctttttctcagagcagaattaaacttatgaagattaaatataattgaggggaatgtaaagaatctgccaacagttaagagcataattacgtttatgtagtgtggaatgcttgccactgagccctggaggataatatatctaccaaagctgtttcaactagacttcctcctgtaagtcacagaacccagaaattgattgtggtcactcttttcttaggtttaatacagaacattcattgtgtttaagaaataaattaaatcaaagtacaatagtaaatttcataaaccttatgattttagcgattaaccttctgaggttaagaagtcccctcaaaagaaacaggaaataatcattgctttgctctgttgctaagaaatatttgttgttatttgcataccatctcctctgtcaaatttttcttcctccttttcccccactgagagcagtttttaaggaacttctcagtaatctctgtctgagtcagcttcttgagaaaccagacctgcaaaggggaatctctgtctccctgtcttaggaaacacaactacaaaggaaacttgacagtgccagtaaaacgcttcttggatttcccctgtcacccagcaatcccacattactttgctattgctggtattgtcatttgaattttgcgactgccaggtgtatattacatggcaaagtgagtagttcattatgttgatgtcttgcaaaatgcaaaaaaggaaaaataaatctcaacaagaaattgtggagactgaataaaatccctgttgtcctgtaaaaagatagttcccattgttcttggcattgcatattccaaatgtggaagtgataatgtagacagcccatgctctagcaatgacactttgatctggaacaaagcatgttttctttatcctcttgatttcctctctaggacaaatactgatgctcttagggttgtgaattgctgcccatttacttcaaaaccagcaatctcttctatttgagcactgtgatgagagtggaaaaagaaacatgtgatgttgaggatcagagcaaaaggaaagtgataggcttgggaatgttgctggtgagggtattaggaagcaggtttgcttcaaggagagtcattacccagtgcttacagacagtgcctgaatttagctgatgcaactatctgataggtgatactggccatcgaagcaacatttatgtattacctgcagagaaatgttatctctctgcctcacagttactttataaactttttgggggattatttctttaattctaggaatcactgtgtggccagcatacatgaaatagcttaggacatagctagcatgcattaatgttgaatcacaaaattcctccttcacagaagaaactgccatacgttctacaggacacaggagaaagcaactgacaaactttgccagtgcaaggcagaagagaccttctaatttcttgcttctctgggaagtctgccagacactctaggcctataagctgaagacagatgcccaacatcacagaacaactttgggtgactgtacagagagccagatatctttgtcatttctagagctttggaaattgcttacaatgcacttcctgtttatttagacaatattatatacttatggggtcttttttttatttaaagacagggtttcactgtggctttggagcctatcctggcacttgctctggagaccaggctggcctcaaactcacagagatccacctgcctctgcctccctagtgttgggattaaagtcgtgccccaccacgccccaatacttatggggtctttgatggagttacagacagttacagttttccttagttatgataaaagataaattaggcataaaactttagactcacaaatataagatagatgacagagtattctctttaatttgccagatgcaaatagattaaatattgtaactgtaattcttgcttgttaactattttgttatacataattttactgtgttaaagttaaaaccttcctttttaattagatagaaaagtggggatgaggtgggatgtccttctgtatgttgtgaatatgtgctgatttcattggttgatgaataaagccattttgacaagtgactagacagaatatagctaggtgggaaatccaaacaattatggagagaaagaaggcagagtcaggagacgccatgtagccactaaaggagtaagatgccagaacattaccagtaagtcacagtgacatagtgatactcagattattttaaaaaatgggttaatttataagagagagctagccaggagtaagcctgtgccattagccaagcaattatatttaatattagcctctgagtgattatttcttaggtggctacagggacccatgagtgggagagaaactggttcaggggaccaggaggacagagaaaaacattcaactacatccattcatggacaattgaagtattctttagaatcgtttgtaattgacttgatcacataggaaactggtatcctgtttgcctggtggagttctccatgggctcacaagtggaacaccttctatgcagtttcttttatatactgcagtctataaggccactgatattcagatgtgtgatggcttcattggggtcacttataaagagttctcttattgaataccaagactcaccaaaagcacacctagtcccagtaatacacttggttggatctgatgagaatacagtgttcatgtgtcccaaaatggagttcttccatgatatagtggcccaggaaagatgactgaagtgggaatccactgagtctgcaaccattttcacagttcacattgtgaaactcattggttttgtcactaaagacaataatttcaatagcacatacaaaggtgatacctaaaggacaaaagagaaacatcagtattcccccgcacacaaagtcttcatgccttcaactctccattgacatagctgtatgctcaaaacagcgtgcatgcagagtgacagcaggagcatgcctgaggaactggtgctaaaggtgagttttgttctagtagggtgagattgttgtatatttattgagcatgttcatccagaagcaacagttcgatggtacacagaggcacagatgcatggggatatggcactcacctgataagtaaggcctggagcaacgttctcagagagcagcctcctccagtgcatgctggaatctgtattttaataagaaccctatgtcattctcatgaaccttaaatgtagagaagtcttggctttaattaatatgagtatttattcctttaaggatatgtgcttttttaaaatcacatctataacttacattttaatgaatgtctttcagattatctctggagctggtgtacttatctgtagtattttcttactgctttgaaattttcctaaaaggtaacaaaattggacaataatcgtttcctcttaagctctggccaattgttagagttcttagacactttttaatgaccatcataaaagcatccaaaacaccaataatgccaatgtatcatttgtggatcacctcatgatttttacagctgtgttggatcacttgcttgtgtttctctgccctctgaattcacagctcacagatttagcttttcagtttgaagatgacacaaatagacgggattctgcagttgggcctcaaaaactgtgtgtttcttctgtgtacatttatttcctaccatctcaggttggaaatgtagaaacaaaggtactcagggcaggtttttttttaatctttgaataattgagtttatttgagaaatgtgctcattttctccaaagaagtttttttttgctatacatgtgaagtaatcaaactgaaatttttttatatattttggaaaaaaactcatatatttattaatctggtagaataatataaacagaattaatttctggaagctcaattatctgtgatataataggtttatatgatgttcaaattatatatatcaatttgattaagtttagttatacaattgtctaatcaaacacaaaactagaggtttttataaaggtattttgggggctggtgatagggatcagtaggtaaaggaacttggcatcaagcctgatagataactggattccaattcttcagacccatgtagtggaagaagataaccaacccctgagattcatcctttgacctctctgtacccatcaaacacacacacacacacacacacacacacacacacacacacacacacacacacgcacgcacgcacgcacgcacacacgcacacatgcatacatgcacacatgcataaacaaacaccaaaatataatataaaaagttatagatacaattatcatacatcattatagttaacattgagtaaaataggtgactgatcaataccaacatttgttagcttatttgaagaaagaattggaaaagatgggataactttaatcagagaaggggaagacagataagtacaggagggtaaaataatattaagaatgcctgaataagtcatggagaaacatattgtttgaaacatctatttgcctgaattacatatactatatatgcctgtatatacatatacatcctgtacatgtagttgacaatgctctcccctaccaggaaccacagactatctaacaaaacttcatcaccaggcatgagaagcctccttctaagctcctggacagggttgtccaagggatccccaaaccattattggttattgccattgctttcggcttcctgcctggggttgaaggtaattaattccctattgcttaagacactgtgaacttcaggcataagaccgaaaggatctcagctggatacaacccaataccttctctctcaggactagcttccatggcactagcagccatgaaagtttccaagggagaggagtagccagtagtcctactccaatagctatgatgcctataaactacaacaatgaccaacatggtacaataattctaagggtacaatagtggcatacaaagtttggctgtaaccaacagctctctaattggatataagaaatatgaaaacttcctgaaagcagatacactattataatattcaagataattatgcagactgcagtaggaacttgaatgcctagtatagtaccaacacttgttttcctagctcagaaaatcaatgctgagagtgataagtgtaaagtagatataattgtctctctttacaactgaattaatttgctccttctatagtagaaaacactcttgaattggaccttcacaagtctaaatttaagcacacaaacatgttttgttgttgttgtttttgtttttagaaatgttaactcaaaatatgcttagggctaaaagcccaatgaagtctctgaaaatccaggcaaatggacttatgattctgtccacaaaatgttagtagtgacagcaataataataggaattattcactgaataataagccacaactcattttcatacacctgactagttcctgattctcctgctttcattctcccccttcccactctcccttttcttggccataaatattgagttcctacttggtcccaagaacaacatgaggcttatgatacaatggacactgaaatccagccagatgaggattctgacttcacagagtgtgtagttgagtgaggaagacaggtattactaatatcatgttacatcagtatgtgctgaaacatctgtaagtatcccctttgatagtgaaatgcaaaaaacatggggctaccaaagactgatttcaataaccttagtaattaattcttgctaatgtgagggagaggaaactgcttctttaacatgaaatggggtgttcatattttccctaaagatttggctcaaatctgcattactagggtgaattaattttttacataaactagatttgttagtccctagagagaaatgtggatgtatagtggtaacttgtgtcttattaccagagtttgattcccacatgaagatggccagcagatgatttgagctcacatcatctctctaatccttttgtgtaaatctctattaatctcaggaagatggctgaggtcatgaggatgactatactatgctgtggtatttattaagcgtttttacattaactagtcacccatgggtctatgctttaatagtgattacatttatgtgatttaattatgattttatgttttcaaagctgtctctctctctctctctctctctctctctctctctctctctctcacacacacacacacacacacacacacacacacacaccacaaaatcaaaaattttaatactggaccacagatgcttggcaccatcttcaggtagctcttggtttcttcaaaaaaggaaaaagatggataatcatgatgaaacaattaacaactggaggttagttcaatttaagaacaaccaaggactggagagaaggctcagccattaaaacctataaccaaaaatataagaacaatcaaatatctcaagacaaaatgtgtgttcctatgttatgattccaatgatttgcagaaacagaaaaaattaaataatagcccattgaaaacaaaatgttagaataaattttgtgctttagccaaatcagaaatgcatgcgaatgcatgtatatttatgttaatgtgtgtgaggtgtgatcttgtatgtgagaaaaaggaaactcttcttatattaaaataattttctttttgcatttgattttaatcatttagtacagtgacgatgaagctcacccacgagaatccacagaataccaaaacaaaagattcaatagcaaggacaaaaggccaatacctgcaaagtcatcatagtttgtcgagcaacagattcttcaggacaatgttatgctcaaagatggtaggacaatgacttcaaacaagtatagtgatataatagctgggtcagagaactgtgcagtgaaatatttagtgagtgagtatgtggaagggtggaattttctgtcatcctttctcttaaagtttgcattattctcacctcagtcttgattgttaaaatattttataactaaaactaaaaacaaaaatgtaagtgtattatgttagtcttaagatgatttgaattctctaacaattctgttgctttataaagtaaaacaggctgggttttttattattttattttattttattagttcaaattaggaacaagcttgcttcaaatgtcaatccattctccctctctctcccctccccccaacatcccacctgcccctagccatcccccctccactccccaggcagggtaaggccctcaaaaggggctccccaaagtctaccacatcatcctgggccaggcctaggcccttccccatgtgtccaggccaagagagcatcccttcacaagggatgggctctcaaaatcccttctttttttaagaccttacatatttaatacagtgtgttacccctgtacaaatggaaaaaaaataagttcaacatttctagaccaatatggctgttaatttttgtacaatgccaactcagcatggtaaactgggatactcttttccaaagttgacagcacaggtaagtttccaaaaattcaaattataccaataatggcagtatgttatgcatcaatagcagcaacagcttttccaggttctgcagtcatttgaacaaaattgtagagacatccagcactctccatttaaagaaaaaaaaaagtaaaaaacaaaatcccagaaaaacagcacaattctgttactcttgtagtacctggcaccattttttttaattagcttctcaatcatcatctggaaggaaaccattctgagcaacatcattaaaaacagctctgataaagcacggtcactactatgtatcataaaccaggcaggctggattttttaaagcatcatctcatctgtctgacatccttttttccatgtctacattagtccacaagtgtctcacaagtacccttccaaacatgctcaatgaactacacttaatgaacaccttggttaaatgaatggagaatggagagatagattcttcactggaataaaagttcaggagacactaagtcttggttttatcaatgtgctttgatggggttagaagactttaaatacagcagacaatcaggtaatgtaatcacgctgttatttaacagagcaacttgaagagagaggccacacctctaatgaggctcattggtagagaaatgtaatcatgcagatgtgcccgtatcatcaacaaaccatggggtagatgggcctcagaggaagactggatagctaaagaagccaatatgtacaagagacagacagagtgctgggaagaaatagctttgaaattccctctatctagagctggagtcaacagtatgactgcttatcactccatcctatactttcctttaaagaacaaaatcacttgaagatactttgctaataaaatttagttatgctagtgtaatttctttgtgtgtgcaatttatgtgtgagattatgcgtatattttcacttggattttgcctgtcttttaatcttttgtcattcccttagcactctgagacatgagaactccactttatctacatgcttaagtttctatttccctgtcttacttatttgatgtgtgattttttgtcacggttttagaaaataaaatactaagctcaatttagtacatagtgatttttacactcagtggttatagaaatttcatcaagttaacttgtttttctgggtaagggaacacatatcagtaataacatagattctgattcttttgatatttctagtcagtattttcaatttttcatcatattgaattttctagaacctccccaacagtagtaaggaatgctcatcttatatataatccttgcttagtgtctaattattgttaagatgctctatgacattaggatgtcaaatgtctagtcaccatctgttaatatgctgtaaatattttgatgttttgtcaaattctatttggtaaaatttaattttagttttagcatctatatccatctgggggattcacaggactctcgaggaacacctgccttatatcatctattgctgatttgggtgttaagcatatgatattacccataagcttttttgtgtggagtttagacataagggcaggtttccccttttgccttctcaatatttctttattgattttctttctggatgatccattattaaaagtaggttttaaattcaccagccatattcagtattttgttagtttcttctttcagatctgtcagtatttgtttcttatgtttaggccttttgtgttctatgaataaattatcattgtatcttacattaattaacctctttatcattatataatcatatatttgtctcttggtaacccccaagacttaaatttatttttgttgatataatatagccaccttattctcttaggattcccattagcctgggatatattttccattcctttgcttttgctcttgtgtctgtatagtagctttccccccctagaaaacaaatgactgaattaaaaataatacatttgctttgtgtattttgattgtggaattcaattaatttatgcttgaagtgatttttgatatacacaaaattaacacccacacttggatacgaggcttctggttacttaatagttccttcgttagctgattctgttcttgtctcctttgtcttttgatgacctttttttggtgatgtgctttccatttctttcccttagtatttagttaccaattacaatgttttcctcagttgttattgtggtgcttgtattatgtattttacagctataacattttaagctggtaacattttcaatcatttactgcagttctatattgttgcctttctcctaatgttttaagttatttatgttataatttatatcatttttgttatattttaaatgaaaaattattgtccttgtagttgattttcatacttttgttaaaaaagtctcatggaaaattctgtagtgatttgtatagcaccacacatatatgaggtggtagatctatctgttcattaatttaatttaataatttgtcattgtaaacataaataaaaaaatcacattgcatcctataattattatttgtcaattaaaaataaaatttaaagagcaaaagttaaaaaaataagtaattgtgtttcagactcgtatttaactggtgagttttgtacattcatatccttttatgttgctaacagctggttttcatttcctatcgaaaccctattaagatttcctaggactagcactgacaaacttccctctggtcatgtggggtagcaggctgtgctgtccagctgtgcagtactctagctggcctcacagtagggcataatcgttttgcagcatctgaaatcactttggccagataagagtgccaatttgctctctggctggatgctgctgctagaaagagtccgtatttgaatgtgatcataggctatctccaaaattggatggggtctcagattttctccatagccaagtgagacagctggactccatcatcgatcaggccccagctgagttctgtggatgtgaggagcttgactttttttttttttttgtccaggttataggctgtgctaggatggatccgagttgctcctaggcactcaggttgggaagggctgcaggctgctgtctgcagttgttcatcactacaatctaggcttcacgactagaactacggcttcttgtgtcagaacgaagtccgagagggagttgtgtgaggagatttctgagtgcttgtgggaaaattccaagaaaagaagacatgagtcttgtgacctcagtttctgcagaacacagaatggttcttgagaagtgtctcctgctcctcccatgtgcagcagataggcatgagtttacttcagctgttgttatttatggctcaagttattcacattcatattccatattctatggaaaaacatgggtttttgccacatgaatcttgtccttgtgattatatacagtttgaaatcatgagaactttactcagatgaactttcttaaccctcagggtgtaaatcattttgatgttacagagaaagttgggtattgcatgagattttagtctgcctcatttttagatcctgctttctcaggtccatgccaccagctagagcagtaaacattcatggtcatatgaggacactgggctatacacataatggctggaagatagggtctgtcctagtgcgtgttattagttatgctctataatgtggtggggtaactctttgggttctctgggctgataatgccagagggacagcaccccatggcttggtgggattgctgggtggtaccatgattggcagaactatgggctctaaccctgtgactatgcgggggatatagaccacgtatctaaattatgtaagctctcctgctaattgcctgtgtgtcccttggtgtggctttgtgcttgatcccatagattttgaatgaatagtcccttactttttagatgattctgacttcctttttattatgattctatattctaaattttttcagccatgcttcttatcatcttgatattatgaaatttaaaaattgttggtgttttgttaagaatatataactggtaaaacccaaataaagtgcatgattaatttttcaacatgttctagcaataaatatacacacacaaactctattctttctctatttgaagaccatacattcctatgcacatttccagtgatgtggagataagtggttaccatagctctctgataggatggtttgtaacagttgtagcatttggagaaaccgccatactgatttccaaagtggctgtgtaagtttgaactcccaccagcaatggggaagcattcacctttctctccatcctctccagcataaagtgtcattagtgtttttttttttttgccattctgacaggggtaagatgatatctcagagttgttttgctttgcatttccttgatggctaaggaatttgaacactttctcaagtgtctttcagtcattttatattcctctattgagaattctctgtttagtcctataccccactttttagttgaattatttggtgttttggtgactagcttcgtgagttctttgtatattttggaaatcaaccctctgtctgatgtggggttggggaagatcttttcccaatttgtgggctgctgtttagtcttgttgactgtgtctttggccttacagaagcttctcagtttcaggaagttccattagttgtcaatctcagtgtctgtgcttttggtgttatgtccaagaagtggtctcctgtgccaatttgtttaagggtacctcccactttctcttccaagaggttcagtgtggcaggatttatgctgaggtctttgatccatttggacttaagttttgtgcatgtatagatatggatctatctgcaatcttctacatgtctgcatccagttatgccagaatcatttctttctttaatgactcaaagttcttgtcatacaagtctttcatctatttggttagagttaccccaagatattttatgttgtttgtggctattgtaaatggtgatgtttctccgagttctttctcagcctctttattgtctatatatagtaggactactgatttttttttttagtttatcttgtattctgccattttgctgaaggtgtttatcagctataggagttctctggtagaatcctttgggtcacttatgtaaactatcatatcatctgcaaatagtgaaagttttacttcctccttgcaatttgtatccccttgatctccttttgttgtgttattgctctagcaagaacttcaagtacagtattgaagagttatggagagagttgacaaccttgtcttgtttctgagtttagaggaattgccttgagtttctccccatttagtttgatgttggctgttggattgctgtatattgcctttattatgcttaggtatgtaacctgttattcctgatctctccaggacctttttcatgaaggggtgttgaattttgtcaaaggctttttcagcatttagtgagatgatcatgtggtttttctttttcagattgtgtatatggtggattacattgatggattttcgtttgctgaaccatcccttcatccctgggatgaagcctacttgaccatggtagatggtttctctgagtgttcttggattctatttgccagtatttcattgagtatttttgcatcaatgttcatgagggagactggtctgtaattctcttagttgtgtctttgtgtggtttgagtaccaaggtaattgtagcctcataaaaagagtggcaatgatccttctgcttctattgtgtggaccaatttgaagaatattggtattagctctttgaatttctgatagaattctgctctgaaaccatctggccctggactcttattggttggaagacttttgatgactgcttctattttgttaggggttttaggtctatttaaattgcttatctgttcttgattaaattttggtaagtgatatctatctagaaaattgtccatttcctttaaattttccaattttgtgaagtacaggttttaaagtatgacctgatgattctctggatttccccagtgtctgttgttacgtccccattttcatttctgattttattaatttgcatgttctctccctgccttttggtaggttggagaaagctttgtctattttgttgattttttctcaaagaaccaactctttgtttcattgattctttgtattgttttctttgtttctactttattgatttcagctctcaatttgaatatttcctggagtctagtcctcctgggtgagtttgcttctttttgttttagagctttcaggtgttctgataatttctagtgtggctattatccagtttctttatgtggacacttagtgctatgaactttcctcttagtcctactttcagagtttcccatagatttgggtatgcttggatattatcattgaattgtaggaagtctttgatttctttctttatttcttcctttacctaggagtgatgcagttgaacattgttcaatttccattgagtttgtggggtttctgcaatttgtattgttgaattctaattttaagcatggtggtccgataagatacaggggttattccaatttgttttgtacctgttgaggtctgctatgttgcttattatgtggtcaattttagagaaggtcccatgtgatggtgaaaagatggcatattcttttgtgtttggatggaaagttctatagatgtctgttaagcccatttgggtcataaattctgttagttcctttgtttctttgttaagtttctttctggtagtcctgtccagtggtgagagtggggtgttgaactctcccacttatgtgtgtgaggttacatgtgtaatttgagctttagtaatgtttcttttaccagttcgggtgcccttgtatttggtgcatagatgttcagaattgagacttcatcttgatggatttttcctgtgataaatataaaatgtcgttcttcatctcatttgattaattttcatttaaagtctaatttgttagatactaggatagctacacctgcttgcttcatagggccatttgattggaaaatctttccctaaaccttaactctgaggtaatatctgtctttgaaggtgaggtgtgtttcttgtatgcagcagaaggatagattctgtcttcatatccattctgttaggctgtgtctttttattggtaagttaagactattgatattgagggatattaatgatggttgattgttgattcttgacctttttttggatttgtttttggtggcggtattatgtgtgaatttttcccatatttctggcttccggtaaagtgagattatctattgcttatgtttttctgagtgtaattgacttccttgggttggagttttccttccagtactttctgtaggtttggatttgtggatatgtattgtgtaaatctggttgtgtcatggaatatattattttctcggtcttttcatggtgtcccatatttcctggatattttgtgtaaaggatttgttggattcaagattttctttggtcgataaatctatttcctctagtttatcttcagcacctgagattctgtcttccatctcttatattctgttggctatgcttgcatctgtagttcctgatcctttacccagcttttctatttcaaaattccctcaatttgtgttttctttattgtctctatttcagttttcaggtcttgaactgtctgaattgttccttcagctgtttgattgtttttttcttggctttccttgttttctttaagaaatttgttgacttctttcatttttttggtttgttttttcttccatttatttaagggagtttctatatcctctttgagtgcctctatcattttcatggagttgtttttaaggccattctcttctgttgcatctgcattgggatgttcaggtcttgctgctgttgagtccctagactctggtggtatcatacaagtctttttgttgttggatgtgttcttatactgtcatcttcctatctcttcttccagtgggtataggtaggtctctccctctcctctctaccagagggtggaggggcaagacaaaaatggcagcggatgatgctggctgctttgttctgcttccccatatttgtattttcttagtttgtgtttttctggtaacttattgtggtttattttatttttcatctttgtcacttcatcataagtatttttttataaagaacaaaatatacatttaatgtaacctggccagtccttattttaataggagactgttcccttaagctggttggtttcattgatacttattctatttgttttctgtcttaaacatttggaagttcttctataatttcccttatattgttttccggagctccatttcaaaataagaagaacaaagtgagccacattctcgcgttcaggatacacttgtggttgggtgacctatttcccttggcatttttactctatttaataaagaccccttcaagtcatcacttcctctcctttcttcctttaaataatttattccccctgccatttacaacctataaattttgctatggtaatttttgtataaattagcatattcctgctagttaatacttttaaacctttaataataagcagttttttagacaaattatcatattactttgtttacagatgtctttagcattcatgtatgtacaaattaatcacatttaattgttgaactttcccctctttttccatgtttaaattcctttttgtttagcttattatttgagtaatgctttcagctcttttgctttgactgcatttactgtctgttgtcctgcatatcatccatgaaagaacggtcatatcttaattgtctagagaactaagtttcatactttaaacgataggttttattctatttctcaacttctgctagtgaaaatgccagtgttatttatttatttcagattacatgtgtgtgcaatcttggtgtcatgtaagagttttccttttatctttaagggattgtagctttattaaggtatgttgaaaagttcttgttttggttgttgacttgacataaaagagcctttcaacttgcagatgttgtttgatgaggtaggaaacatcttttatttgtctaattactttggatcttcattgattccacttttttctaaagcccttgttattcattttaagtccccccaccccatggcttctaactctcctttcctgaagctctccatttccaatctctactttcacaatgcccctacccctgttttttgagatatttttgaagcctatttttttaagttagaaattcgtgtgaaatgatgcttttaaaaaattcagatggttggagagattgctcagtggttaagagcactagctgctttcccagaggcgccattttgattttcagagcctgcatatgaactaacaaccatctgtaacttcaactccaggagatctgacactctcttctggcctctgcaggtaatgcatacatatgatcatagacatacatgtaggcaaaacacaaatgcacataaaataaaaataaatacatcttaaagataaaataattaccagtggcattgatgggtttttaagtccagaaagtagaggctacattctgtctctgctcctagtatctcacagcattggagagggcacttaccccttaaagcttagcttaatcatctgtaaagagacctaatttttgaaatatataataatgattgaatgatacagtttaaatatttcttttcatattacttgatactaaaaccatgttccacaaatatttagtgtgacatttgattaaatatagtggttaattttaggagttatactggctagttttgggtgtcaacttgacacaagatagagtcatcagagagcatggagcctcatgagaggaaatgcctccgtgagatcattttcccaattagtgatcaatggaggagggcccagtccatgggggactatgccattcataggctggctgccttgggttctattagaaatcaggctgagcaagccagtaagcaactcccctcgtgggcctttgcatcagctcctgcctccaggttctagttctgcttgagttcctgttctgacttgctccaatgagggactatgatctggaagtgtaagtcaaataaaccctttcctccccaagttgctttttgatcatggtgttttatcacagcaacagaaacaccaactaagacaggagtcaagctgaatgaactgaaggataatcaggtaactcagagaagcattatttctggatatacctatggcagcatttgtggaggaggttggtactttaatgggtccagtgaatggggaagatctctgttggtgggtgctgccactcggctgagagctctgactgaacagaacagcagaagaaagatgaattgtcttactttctgcctcttctagagcttaacccacttctgcccttaatgttataactccaagtcctttttgtactctgagacttgtaaaagtagtattccactgcctccccacacctgattctcagcccttgggctttttagattgagagtcactatcactggattccttgtatgggaggccattagatgttatttagccaagctgtatgcttccctggatccttaggttgtaaggacttagccgctgtaattgtgcaagttgaatcaactcatgtatctatatctttcatttcttaatggttccttttgactagtatattaagcaacacaaaatttaagtttgtgggggaaatcacaaagtttctccctcccaagaattaactatatagtattatttcatggctcttttagaaaagcctttaaactttgctaaaaaaatttaatgtcttatataagacttgatagtttgttcatggtcttgtgactaaaaccaggtatgattgctattgtaatgatgctgctgaattaagtttttttccctgaaggttacctatttaataagtgacatatagcttgacctcaagcttctaaagctaaagctattacttttattgagaattaatcttcatatgaatatttatatttttgatttatactcaccaaacggtatctgactggattacagtcattcaacttcatatttaatacattgatttagttcagcctatattctcatgaagtctttagttgtggctcaaggaaaagtcttacaaagacatgatcacggttgagtgaagataaatctaatcaacaagcttccttatgagctaatgttgaagctgaagctttgggagtacatactcttcagggctgaaaacatcaaatagtattcctctccttcctcagcttctccttcaactcccttcattactcttttcaaggatagccacaggtctcagatagctctctttctggcctatattctagtgaacagaagaacatttggcatatttcatgtcaaacattggtttatactggcccaggtttatcaatggctgtggtgttgctcactgtatacggttctacctggtactgttgtggaagctgctaattcatgcccagaattcgatgtgctagaaacagtctggcagatgacaggacctttaagatgtgggaccaaatgggagataattgcatcatgagtgctctgtgacttaaaggggttcaatatccaccttgtggcagttagattatgtctttcaggactggattaattcccgaaagagtggcttctaatgaatcaagaaatgtttatgagccactcttgctcatcatccttatctgtaatgtaatctgcagggttgtcccttactaaaaggtagagttgaatagtgaaaagggggacttgcctattcttagactttcagtgaactaaataattccccattttcttaaaaatgagtacactcgggcattttgttatagtaagataacatagaataaaacaataatctagtgtataagtttatttttacagagtgggaataaaacccacttggtacatgttaagagagtatcctacccctgatatatatacatgctctgttattattatttgggatttgtttctcatgagaacaaaagtagtagtctttttataaggtaaaaaaatacttatagccgggcgttggtggcacatgcctataatcccaggcagaggcaagcagatctctgtgagttcgagaccagcctggtctccagagtgagtgccaggataggctccaaagaaaccctgtctcaaaaaacaacaacaacaaaaaatataaatattttaaatacttataaaacaaaatagttataggaccttgaattataataaaagaattaaagataataatagatatattattattatcttatattattaaatataataaaagaatcataataaaatcctctttgttgtatcctgatagcaataattagaaacgcttaaacaaaagtaattgggtaaaaagcatagctttacatctggtgtaatggaactaactgtattcaggagtaatggcttcacaagtgcaaatccatcaagtaactggaagaatcctttaagcttgtattcagctattctagtcagtgtaaagttgggagtatccacaatatgaacttttagttggctcctcagtctggttcatagaataagcaagctactagcagcagtttatgctggactccagttcataaaaaactacgaaatagtccatgtgtatcactcttgggtgtatatctgagggattttatgtgaacataccacagagataattgtggattcatgctttttgcattactctttgcaatagccaagatctggcttggctagatatccatcaacagatgaatgtatagattgtggcacatacacacaatggaatattgttcatctatgaagaaaaattaatctatgatgttttcaagaaaatggatgcaaatgaagatcatcatgtcaagaaaagtaacccagactcagaaacaaatgcccatattttctctcatatgtgcaaatgtatgtgtgtgtatgctcatgaaagtagaagagcaaccatgagatgggagatgggaatattacaataggtgagacaaggcagggtaattgaatacatgtgacatgaaaacagtagggtatactttttagggagagaaggtaataagcagaaggggaccaggggagatggaggaggacaaggggagagaggatgaataagaacaaagtacatgatgtatttgtatgaatgagacctaatgaacccattatttttcatgctaaccaaggagtcaataaaaagccaggcattgtagcataaacctttaatcatattgctcaggagatagaggctggtggatctctgtgagtttgaggctagctcaatctacatagtgagttccaggatatacagggatgcagagaatccactccccccccaataaaaaacaaaaaaatagaaaacaaaacataaaacaaaagacaaatacaaaacttccaaaagagttagtaaaaaaaaaacaataggaagggaaataccttgaattattgagttcttacaatataaagggaaatatccatgatagatttggccatggtttcttgcatgtgataccagagaattaagcaactaaagaatcattagacaagctggatttcataatactttaatttttttttgcatcaaaggactctattaagacagttaaaaggcacccagcaggatgggagaaaatatttataaatatttatatatctgaggagattaacattgagactacaaacttggtgacggaaccaaagaatccaattaggaaatgtgatttgaataggcatttctgccaaatttacaaattgcaaattaaaactagtcattagctcaaagtcactaagatggctactattaacacacacacacacacacacacacacacacacacacacacacacacacacacacgtgtgcgcgcacacacacattggtactcatatacaaaaccaagcaaccaaccccaaaataactgattgttttcaagtttaaagagaaattggagctcttacacttagttgataaaatggcacagttgttttagaaagcagcatggaagttccttaaaataataataaaaaaaaattggattaccataggatctagtaagtcccctctatgatatgtacattttactgaaaacacattcttgacaaggtatttatatgcctacattcaaggaaaaggttattcacaatagaaaaatttggaacttgaagggcacaggaaccagttaaagatggtgcctaggggaatttaggagggcaagtcctgagatgtttgcaaaacagagtgattggttgccaagatcgaatcagataaggtcctttaaaagcattggctggctgttttcccactctgcagttttttgctttaaaagatgcttgctctggggcaataaacaagttcctgcttgactagactccctgctgtgtctgattgtctccaggattctgggaggctggggaatgggccagcagtgcacttactcttcctcagacccagctcagccttctgaggaactaattgctcagtgaatgcacagcaaagctaaatgtcatatgcaaacaatgtaatatcattcagccttagaaacagaaggggagctcacatatgctacaaagtggaagcttgaataatttgctagttaaataaggcagccactaaaggcaaattcaggattagttcacttatgtgcaatataaaaatctcatacagtagagatataaaggagaagtaaaacttaatgaaataaacaaagaatccgattagaaaacaggcaaatgacctaaaaagacattctgccaaattaacaaattttaaaactggttatcagctcatattcattaaggtggccactattaacactcacatgcatgcacacatgtacatacacacatgtgtgtgggtactcatgcattcatatatgggcttggaggagaggagaatagggagccactgtatagttggtgtggcctggtgtttcccattttgtaagaagaaaatttctgctggtgggtagtagtgattgcacaacagaataaaacttagtgcacctataaatggttaagatatccaattttaagtcatgttcactttatcctaatgaaattgggtaataaaataggttcacatgggatgtttgtttgtatgggactatgccatgattgggcacatagccttcctggctgtccctgcgtttataaatggtactgattggaaaaattctactcttcatttcacaaattgtatttaaatatacataattaaccatgtcaacttatgctgctgttcttaatggcaaaatatgtttgtcctctgagtgatggaaaattgctaatttactagtcttggggggggtgctgcttgtgtccaatgtagagctcaagcctcaagacattttcccttgtcttagtcaatgtcctattgttgtaaagagacacaatgaccacagaaactcttataaagagaaatttagttggggctggcttatgattcagagattttggttcactgtcatcacaatataaagcatggtggcatacaggcaggcatggtactggagaattagcttagagttctacaacaagatccacaggcaacaaggaagagagagtcagtcacagggcttggcttgggcatttgaaaccccaagtgacatacttcctgcaacaaggctacacatcctgatccttttaaataatgtcactccctatgagccaataggggccattttcattcaattcacaataccctccttcctgactgactgcaaaagtacattttcacccatctttctagttcaaaaccttcttttctcactctcagtgaactagattcatatgacctacatagaggctgtgattggccaggagccatctagatcagtggttcacaatctgggtccaagacgtctttgggagtcaaatgactgtttcacaactgtcacatatcagatatcctgcatatcaagtatttatattacgattcatactagtagcaaaattacagttatgaagtagcatcaaaaataattttatgggtgggggtcacagcaacaggagttactgtattaaagagatgcagcattaggaaagttcagaaccactgctttaaaggctgaaccatctctctggcctcataactgataaatgtattaagagtaggacaggcctggtaggttccagctgtccgtcctagcagcagaatgaatgaaggtagccattttaatttaaagagagcaaagtgcttgctggtaatgtttcctgctgttttgttccacatctttgaacacatctttgaaggtttctacttcccttaggctttgacaggtgcagtctttagtctctctactgggtgggttctgatatggatccttgttattcctctttcctctttcctcttctctaatttagcagtctgatttctatgctttctgttatttgccatctaccatgacctgaattgttaaacagaaaataccccaaataatctatgattataaccatgtgctactctatgttgcatgatgaaatcttgtatcgtacaaaaccattccacctgccaaacaaaacattgctttgctcacaatatcaaggctacacatactactcatccatgagtcattcaatggtcaccttggttattaggttagctgctgaagtattgtagtaccagggtccaagtaatctctattttaattaatgatggccgctaagcttaagagtaagaatgtaggcattttttcatatgccaaagagaagccagaaaatgtctggcttcagtgaaaaggtgaaagttcttaaggtaagaaaagaacaagttattctatttgtggagatgaacagttaagaacaaaatgtagcatgtatggtatatataatgttcagtaccacgagatgttggacttctactgggcagtttggatagtgtttccttaagctaagaagagattgctgtagttgcccaggcttcacctgggcatccctgctgcttgtgagtttcctacatctccctaggttttgtttctggaaactgcagttccgtttaaggttcacccataactcctcgatagaccaccctctggaatagcatcttccctctgtgtgctgcacaggctctgcacattgtatgtgcctccactcgtagcacactaaatctctgtctatgatttagtaatttattcatctatctcctttttaggtattcctatggaccacgtctctatcttttagaaaataaactttgcttcctatagctgttttagatgtacagaaataatacaaatatatcacatgcccatacatgacacactcaataacatcttatattaatatggtacatgcctccatatctggctgaagctgatagttttgcactaaccggcttttattctttagtttaggaatcatggaatctcatgcagtttgtcttagtagtttgtttacatactgagtactaatagggtctactctaagcccagagtttaagaggaggtattgtaacagcttaaactccatttaaaaacacaacaaacattatgtcccaaagcatgttcttatgttttgatttacaactgcaagaaacccaagaataaaccccatgagtcttggaattcctttaaatcaaggcttgcaaaaatttcagagcacatactgagtctttcagatgctttgaggagataagccaatctgtctgccatgaaagcatgtgctaatctctgacacaagcatgcagctaacaccagctcctatgggaagatttcttatgaaaaattgtgtgtgaaattttactcatcttttagaaatgatttattgagaaggaagtgtgcagcaagccccagacagcagtgacacactgatgggtctattgcagcactcttggcagctcacactggtaaataatgcaagaatggggttttccctcttcattttacatagaggctcaaaattactttcttgtctgcttgcttttgggatgaatctaggtcatcacaaaaggcaaatagccttcagttattctttctgcttggcttaatggcaggcactcctcggagagttttaggtacattaactcagctaacccttacaaacactattatttcccccctttattaggaagaaactgaagcctggagaggttaggcaccacaggcaggatttcacagctaataaagggtagagttggagtttgaactcaggtgatctaacttcagtgtctatgcgatcaatcaacttaccatgttctctttgtgagctggttgggatatgcaaagccataagcaacttggatatcttatcataatgtattacacatacttgttactcagtgtgctggtaaaataaatgacccagttactcaaatgctgtgccaaaactacttttacaaaactctgtgcaccttttcatgctttggataaggttgaaataaagaaggaatgcatacaaacatcaacacatagtttagaggttttgtctattataaaatcactaaaaatatggattgagtgtaaaaggaaagattattacagtaagatgtttagtcatggtgatggtggggagaggagtaactgaatgtcttcttgaccctgttgagatatttgcttagaaatttccttgcttggagctttttccttttttgagacagggtcacatgtatttcagactggcctcaaatttgctatgtagactgaggaagactacgatcctcctgtctctatatcctaaataccctgctgctactctgggtttttttggttctaggaaacaaactcagggcttcatgcattctaggcaaacactctgtcaactgagctacagccccaattttcttcaattgcaatatatgtctactatattcctataatatccactatgtgccaaaatctggtataaataaatactaacttgctaaagtctcatcaaaatttcatgaagcagatattttcgtgtttaatttaaaaacacagtgactgaggacacgggaaagccattaatgcagcctggaacctaactcaggtcacctggctccagagcctgggttttagctacaacttggaatgtggcgaaccacctctgctatgttgtagaaattttctttctcgttttctatgttttcctgtgggttatttgaggttcatttgcatttatccttagtgcttcttagcatttctgttctgtatacttgtttggctaactagtttaggtatttccagttatatagaattcattaccagctaccatttttcacattttccagatggagtgagtgtagaagtcttagctccttttctatcctttggactttcccattcataattgctttggatattttatctatttgcatccagacaatgttatatgagtttgggataaaccaccaactacaatttagaaagtttaagaggaaaaattgtgttttctttaaaaaacaaagcaaaacgaaactgtttttgttctatattgacattctagtgttccttcttttatatgcctttttcttctaagagtataaagccattattttaatcataggttcaatgatggcaatatattgagaggggattatattatctttacagtttcttgattttctcatcattccagagaagtagattttctggttatcaattttggattgttagttgttttatttctacacttagaaaatgtgccaaggaaacttgcttacttcattgatctcaatgagaaacctacatcattcaaattttattttttaaatatagattatgttttatttctctttgtttggtttttaggtttcccttttgtcttttgtgtttgaggtttaaccatgttgtctcttcccgatggtttctttgagttcaatctggttgagtttctctcagttccttgagtccatatatttatgtctttgacatgttttcaaatgataatttctttgacttttttcactactaatacctttaaagtagtgattttacttttatttttgatagttttatattttttgagaactgatacatgcatatcaagcatgcccttttctcctctccaactcctcctgtccactcagcattgttcacatgtgcatgtttctagggctgaccacctacaatatacaacctaggtaggaaactgatccccggaggaaactgattcttccacacttaacaggcattggccacctacctatagttcttcatctatgggtgggaccatgtggaatttcacttgtcctcattggtacctcaatttgtattgtcattatggtcttttccaggcagccatactgtgaagtctataggaatactttctaagagtagatatcctgagtgtctggtttcaatcttttttgtttctttgcttctttctttctttttttttttagaaacaatctgactttacatatcaatcccagtttcctttcactgtcatcctcccatgtcccccacagatgccccctatcccctccccatccactccccaaagagggtgaggcctttcatggtggatcatcaaagtctgtcatatcatttggggaaagacctgggcccttccctgtgtctgagagagtccctccatggggagtggactcccaaactccatttgtgcactagggataaatactggctccactgtcagaggtcccatagaatgcccaggcctcctaactgtacccacattcagaaggcttggttcggtccaatgctggttccccagttttatgactgtgtgctcccacttggtcaggtcagctgtttgtgtgtgtttctctagcattgtcttgacccctttgctcatctctcctcccactctacaactggatttcaggagttcggctcagtgcttatatgtggatgtttgcttctgctttccatcaactacttgatgaaggctctaggatggtatttaaggttgtttcaatgtttgctctgcctcttccatgacttttctgagccttaggtataggggttgtgttgcagatacatcagttgagcattgagtggttacttattctctgtgttttgaacaattgtagacctctataacagtctccatctgttgaaaaaaagcctcttttggtgaggaatgagactatgcttatttgtgggtatatacttagtaaataattaaatatgacatttaggaacttggcagtagtagattcttcttacagatctatgactaccgattgtgtccttccattggtagcttacatagcaccttccaatactatgagaaccattcctcagggaagaggctataggtcaagtctactttgattcctccaagttctatgtccaaagtgtgtggtgtctccagcaatgaatttttttgtatccttcactcaaaaattacatcccagcctcaattccctcagtctctcttcccacctcctgtcctccccagatctacttctcctccatttcccctcagaacagagcgggcctcccagggatagcaactgaacacagcataacatcttaccttcaaattctaggaggcaacttggggcaatgggaatagcctgtattgttttggggggtcttgagaggaggtttctcatgtctagtagtgaggattttgttagttttaactatataactatgtatacacatacatccgtattctatggaatttaataaaacaatatgattccctaagtcctctgcatacatccttagtgttgtttatacctcctccttacttctcctgggtccttttacttctttctcaggatttcaactgatgctccatgagtttgacttttagtctgtttctctctgttgttcaggttgagtatattctatggtttaattttcagctccgctgattcttcttctatcctcattactctgctgttggacctttccagtgagttttagaattttgtttattgaaggctttatctctaaaacttctatttggtttttctgtgtagattgtttctttccttgagtttgtatatcctgtcttggttccagcatgctcctgaatacttattgaaacattctaggatgtcctatgtaacactttttatcagataatttcgacatttgtatcatattggtatctattgattttcttttttgatttggcttgatagcttcgctggtcttgagataaatgattttccattgagagactgccttgtggcaaataatacactagatttcacttacctagtttatctaactatataccacttttaaaaatatggagattgagagttccgagcaaacaaaaccaaagctgctgtttatacagagcctcttgtgtcctattccagggtaaagcaagctaaaatgttaggtcagatctatgagaagggtaactcaatcctgatgtctagttatgtattatgacaaactcatcttacaaaagagcctccaggataggcagatggtcatggtcaccttcacaaataatctgtcccattatttgccttaaggaagcatggattgctcttgtctcactaattatttttaaatattttccaaatttcttacactaaaatactctttcctttagtatccaaaagaagggttatgtcaagaaaaccagaacaagtcatggcaggtgtcaaggggtgggtgctttgcaaatgaaattcaacagctgtgacttctgccttttaaatatgtaaatgatcaaagctaatacctgggtggggtaaaagtccctgtctgtttcatttgccctggtcataaaggttaaagcccgttaagattttctctggctgtgtacctcacagcctgtctttgtctgggtacacaacatgcagattcttctaggcttctcacttgtaggggctttttggagtctgatgtcaactttaattgacataggtggggacagacagccaggtctgcattgttaagtttccatggaaatagaaactctttcattgcatctgctattgggatgggagcaagagaatgtaaagagcaattccctagactctcctcaggtatatatctgaccccatagagagtgcagaaattacttagttgggtggtggttgctcacatgtagcatgaacattagaataatgtgttaagtgttaagaaccatgatcaaactttacaaatccaaactatgtggggagacttgggatgcatcattttgcttctcagatcagttgtaacaccttaccctcatgcagtatagaagcacttttagagttattccccaatgacttttaatgtcttatccatagatgggaatgttgtctaccagccagaatgttggaagtaagataaaaatatctaggcttccagtagccaccaagtcatttatgagatttagtacgatgataaatgtgaaaagggcactttaaatttcatgatactgctcaaacacagttaatcctttttgaaaaaaaatcatccgttgtttcatcttcaaaattcaaaacagaaaaacttagatttacagaaatcaggcagcttgttatttaagtaaagagtgggagttggctttcaatggtaactgcctcctagctcagtagtcttcacatttctattagaatttcaagtattttgtggctttgggacattctctagaatctagagtctagatgtgtgtgatgatactaagtagccagggtttgtgtctcattcccagtgtgtgggaataaagttgtatgtttattatcacaaagtctcgttgaaccacagatgcaccaaggctcaaggccagttccagcatcatttttgcaatgggtcaaatcagcacttgcttgtattggtactgtccatatctgttttcacatatgttgacagttaaatatctaccacagggggagtaccagcatatttattaactgtctttctacagattttttttctgatccttgattttgttcatcatctcccaagccgtagaagaaatggcttcaaatgatgatattccacatttcatgaaggccacctccagttgttcttttccacaaattatccccagattaatcaatgtagacaaatggaagtcttcaactattgcttattttcttcccaagataatcttggacatcctgaacactggatgcatttattcctagaaggccccctggccctaatttcatgaaacattaaaacaggaaggagagggtgttatgtaatctaccaatcagcatgtttactcaaagaatgagaaaatggaaaatcacaaagaggactctatttccctcaagttatgtgctggttggtaatcagatgagacactctgtagtagtttaactatgctgaggaccgaatcacactggattgcaggttttaggtgtgaatttatgctgaatagggcaaggtcttggagatatcacataaatcaaagggcaatatttagtaagttcatattaagatctgggacctagaacccaagtgtatacaccaagcatatccttgcttaactaagcaaaagtacaaaggatagactgcactggtcctcttggtctttgggccctggtttaacctcatattcttatatcttcatggctaaatgtagggttggtagatgctcccttttgacctgatggagcaatggcctcaagtcaagctgtggtaactgttcatgtcaagaatgagctcaccaagagcagatgttcagagagtgaggttaaccctaccactcagctttctttgtgtttcctttgcatgaagagcacagtgtttgatttgaatagatctttaagtgacaaaagccaaaagatgtaggcatgtcatctaggcccacccaccagacttttttataatttacaggtattttataattcatttcacctgcacaatagtttttctcccaaaggcaattgaaagtacaagctaaaacaataaaatggctaataggcaggctagtatgttatcaggaaggccaaggcaagggcatggctaagatggtagaatcattggcaacactgtttgctttttaaactaatgattttttttccaagaatgtaacttttgagtgacagctccattaatgagaagacagggactgacatgcagtgctgtgactgaagcattatgtactatttccaacttcaagtaagaccagagatgatcacctgtaagagactccacaaaaccaggctgtcaatagtctctcatagaaggagtaaggaagggaagggttatcagtccctcccagccccttgtttacttgcttattcttgcactgtcctcttggtattcctgatctaactcacatggtcttgagagttactacagtacacatgataaggaacattatctcaaggagagaattccatctctgaagccatcattttgccaggtcatcccccatttgaaagtgcgactttttagaaatatagcttatttttgtcatccatctcatataactaacctcctaagcttgacttggatcgaatcttttcttcagtctgtcactagcaccctgtctggagtgaattgtcatttcttcacacctacccagaaaatgtaactcaacagcctgatttttctctgcccaggatccatttcatgtaatagtaaaagggtcagtaacctctggtctttagagaatcatcttctcctagtatacatgccttaagtggggttgtcaatcaccaaagagtttgcatttttagttcttttcataactgaaggaactgaaattaaattaagtcgccattctctataccagtaacaagggaaagagctaagataagaactcatggtctgaagatccacgagtacaggatacagctatgagcagcctgcccctcaggtagcacccgggttcctgtagggaaggaagccagacataaagaaaaaggaagcctggcatcaatgctggcccttttccattcagtttttatttacagagcagcatctcctcaaataaaagaatcaggattcagtttttcttacagttgaaaattatttttacaggtgaggcacagagttaccaatatgtcaaatggattttgacatctaaaaggtaaacagctctgaggtacacagcacgaattaacaagtgagtgtcaaatgaggggtcaagaccagggctccctgatgcctaccctcacagaactgcttggttttctttgggagttctgacaggtggaggtttctcttgacactgcagtggggttgtgccttaacttttatgagcttaagtgtttgagcaatggaaagacagaaaaaaagagaagttgaatactacaagtgattccatctgagatgagaaaaaaatatcatgacttcttggtttgtttcaggcctcaatagagctctattttttttttttgagacagggtttctctctgtagcttttggagcctagcctggcactcactctggagaccaggctggccttgaactcgaagagatctgcctgcctctgcctcccaagtgctgggattaaaggcatgagccaccaaggcccggcgagctctattttttttttaaatgagtacctaaccatgcttgctaattggcattaaacagttaattaacttcaaaacaatattcgttttacataccaaacacagttctccctccttcccctcctcctacttcccagtcccctaccctcctcatccacaacttagaaaggataagaccttccatggggagtcaacaaagacaacattaagttgaggtaggaccaagccctgcccccctgcatcaaggttaagcaaggcatcccaccattgagaatgggctccaaaaacccaggtcaatcaccagggataggtcccagtcccactgccagggccccttaaacagatcaaggtatacaactaccacccacatgcagaggacctaattcagtcccgtgcaggctccctagctgtaggtgtagagtctgtgaatttccaggagctcctgtcagctgtctctgtggatttccctgtcataatcttgacccctcttgttcatatactccatcttccctctctcccactggactcctggagcttggcctggtgcttggctgtggatctctgcatctgcttccattacttactggttgaaaggtcaatggtggtagttagggtagtcaccaatctgattacaggggaaggccagttcaggcaccctcttcactattgctaggagtcttagccaaaaaagatggtaaacagccacataaaatgtggccacctgctttccttcctgaattccttacagtatacattactatttaaagcaaaggctgtaacattatctcatggatatagtccaaattatatgaagaaatacaaatgtaggtaaaattcacaagacaactgaaggtttctgaaagttaattaacatagaccttggaatgggttctcatcgacatctctcactcctaaactccagctgtctgctcaacactaagaaaagggagtaatgcaactagacttcctgcaactggtgctgtagttgataggcaaagacattttcagttgctatctgcccagttttctgattgagcaaatactgtctttggaatttcagccccacctaagttgctgctccctgaatccaccaccaccacggcatcagcaatgtaatgaaactgtagattatcatctctggtgtcagaaagattcatgtttgctttgtggtaacgtgtgtgatccctattattgaaatatattgatacaaaatgtttaccataattccttttctatgttaagtacttgaatggtgtctattaatatagtcattgtaacagaactgttcaaagatattttaatgtaatatggcccaaatttagtaaagagctgattttgataatccatgttctttttgttttacctttctttacccaaaaagaaaatgtggtcatgtaatgttcgtgaggatctagacttctgttgacaatgtagatgtgatcatctatttccttcattattgtcattttgtaccaaacctacccaagtcctaatagcttacaaacaagtctttatgtcacaaggttgcttggtaggcagtctgatttgctgtaggctcatcctttgtgaccagcagtgggttggacaaactactcttgactaggctggcatgttcaggaacaatcctggcttatacatctgaaccttcttccagcaggctagctcagaactattcatgtagagttctgtgaagcacacaatgctttttgaagcttaatctcagaactgctactgtatcattgtgtctatgtctttttcaataaagtagctcacaagcctactctagattcaagaggtgaaagacagaggttcattcttgaggaattaatctgccaagttatattttaaatgaagtttttgttactttaggtgccttagtttgtgtcagtggggccaagagtcttaactagacaaatatccctgttccatgggcgagttcaggtcctctggtagttgatgaaggtcacttgcagactactgggtttcccttattatgtttttccatagcaggattcctaaaactgaggtttttttttttttttaaacagagagaattctggttttattagaacttcggttgggaaggcaagacttttatttaaatctttagacaagccctctgtctatttgtttacaggacaggggccatcaatacatgaactgaatttgaaaatagggttgctcaaaaatttgttttgcattgcacagtacagtgctgtttgctgttctccttagacttggtagaggtggcgcctgtggcagtggtaacgttgttgttcttggtgggggagactgaatgatcactgtgaggaagttctggatggaatagtggctcactttgccgtgtaaaggcatgagtcctacaatgtctttgtggaagccgctgctggtggcacagatgctggcttggtcagtgatggggagtaatctattagctctagggtgcaggaacaaagatcatggcaatctggcacatgttccagagtcactaaagtcacaaaagtagaaatataagttactttactactaactgtcctgtttggttgttaactttggttttattctcttttctttctttcccattctgcttcaagattatttgtatatatcttacttcatttcactttatctactggctggttggttatgcctgtttatttttccctcttgatttccttaaagatttcaatacataaaggctttatttctcctccacctcctccccaccttccttctctttctcttctaactaaaagatatgcaaattcctgaaattgtttacaaaatttgttcaggtatgcttgtagagtacagatgataattcacacatagatattccatagtttatgtaaaattttcgtagggttcataatgtacacaccaaccctatgaatcaaagtgaaagaataataggtaataacaaatgatgaataataaaacaaaaatcagatttaatcatttttttgagataggatttctctgggtagccctgtctgtcctggaactcgctctgtagaccagactgtcctcaaactcacagagatccgcctgcctctgcctcctgagtgctgggattaaaggcgtgtgccaccatcgcagacatttatgttgtaaatgcagctcactgcaccagggtaagactataaatatacagatgtgtctgaggtgtcttttaaaattacaggtctgtaagatgatctgatgtggcaacttggtgtctgtaattttgttttgttttgttttgttttgtgttttaagtgagcataatgtcttttttttctgtattagttcaagttagggaacaaatttgtttcacatgtaagtcccttctcccttttccccccttacccccatctctcctcccccacccccaacctaccccccaccccatccacccaccactccccaggcagggtagggccctcaacgggggctctgcaaagtccaccaaatcttcctgtgctggtcctgggcccttccccatgtgtccagggccagagtgtatcccttcacgtaggatgggctctcaaagtcccttcttgcaccagggaaaaatactaatccactaccagaggctccctggagtgcagaggcctacttattgacatccatgtctggatcagtcttgtactggcctcccagacagcatctggggtcgatgtgctctcccttgttcaggccaactgttcctgtgggtttctccaacctggtacagacccctttgctcttcatttaaatctcttcaattaaattcccgatttcagctcagtgtatatctgtctctgcttccatcagccactggatgagggctctaggatggcataaatagaagtcatcaatctcattttaggggaagggcttttaggttatcctctccaccattgcatggattgtcagatggtgtcatccttgtagatctctggagatctccctagttccagatctcttctcagacctatagtggctccctctgatatggtatctctcatcctgctctctctcctctattcttcccccaactcaatatttctgttcctccatttcctctcctctactcctcttttcttgctcttattgtggcagctccctctcccctaccctcatgttcccaattagcttaggagttgatgccacttcccatgcctgggatccatttatcccttagagtccatgtttcctagtttctttggtgaagaggattataggctggtaatcctttgctctatgtctaaaattcatatttgagtgattgcaaaccatgtttgtctttttgtgactgggttacctcactcaggatggtttcttctagttccatccatttgcctgcgaatttcaagattccattgcttttttctgttgagtagtactccattgtataaatgtaccacatttcctcaatccattcttcagttgaggggcatctaggttacttccaggttctggcaattacaaacaatgctgctgtgaacatggttgcacatatgtccttgttgtatgaatatgcactttttgggtatatacccaagagagaggtagactgattcccatttttctgagcaaccgccatactgatttccagagtggtcttacaagttcgcactcccaccagcaatggaggagtgttcctttttctccacatcttctccagcatagattgtccttggtatttttgattttagctattctgacaggtgtgaggtggtatctcagggttgttttgagttgcatttctctgatggccaaggattttgagcactttcttaagtgtcttccagccatttcagattcctctgttgaggattctctatttagttctgcaccccactttttaatttcattgtttggtgttttggtggctagcttcttgagctccttatatattttggaaatcagtcctctgtcagatgtgggatcggtgaagatcttttcccattctgtaggtggtcgttttgtcctactgactgtttcctttgccttgcagaagctcctcagtttcaggaggtcccatttattaattgcagacctcaatgtctgtgctactggcgtaatgttcaggaagcagtctcctgtgccagtttgttcaaaggtaattcccactttctcttctagaagattcagtgtggctagatttatggtgagatctttgatccatttgcacttaagttttgtgcatggtgacaggtatggatctatctgcaatcttctgcatgtccgaatccaattgtgacagcaccatttgttgaagatgctatcttttttccattgtatagatttagcacctttgtcaaaaataaggtgttcgtaggtgcgtgggttagtatcagcattttcaattccattccattggtctttctgtctatttttgtgccaataccaagctgttttcagaactatggctctatagtagagcttgaagtcagggatggtgatgcctccagaagatcctttattgtaaagagttgttttggctatcctgggttttttatttttccatataaagttgagtattgttctttcaatatctgtgaaaaactctgttgggattttgatggggatttcattgaatctgtagattgcttttggcaagattgccattttttctatgttaattctgcctatccaagagcatgggagatctttccattttctggtatcttctttaatttctttctttaaagtctcaaagttcttattgtacaggtctttcacttttttggttagtgttaccccaagatattttatgttgcttgtggatattgtgaaaggtaatgtttccctgatttctttctcattggatttatcatctgtatatagtagggctactgaatttttttgagttaattttgtattctgctaccttgctgaaggtgtttatcagctgtaggatttccctggtagagtttttcgggtcactaatgtatactatcatgtcatctgcaaatagtgaaagtttgactgcttcctttccaatttgtatccctttgatccctttatcttggcttattgctctagctagaacttcaagtacaatattgaagagatagggagagagtggacagccttgtcttgttcctgattttagaggaaatgctttgagtttctctccattgagtttgatgttggctattggtttggtgtatattgtgtttatcatgtttagatatgttcctgttattcctgttttctccaagatctttatcatgaagggattttggattttgtcaagggctttttcagtgtctagtgagatgatcatgtgggttttctttttcagtttgtttatatggtggattacattgatggatttttgtatgttgaggcatccttgcgtccctgggatgaagcctacttgatcatggtggatgatttttctgatatgttcttggattcggtttgccaatattttattgagtattttggcatcgatgttcatgagggatatcggtctgtagttctctttcttagtcatatctttgtgtggcttaggtatcaaagtgattatagcctcgtagaaagagtttggcaatatcccatctgcttttattgtgcaaaacagtttgaggagtactggtattagctcttgtttgaatttctggtagaattctgcagtgaagccatctggccctgggctttttttttggttgggaggcttttgatgactgcttctatttcattaggggttataggtcgatttaaactgtttatctgatcttggtttaattttggtaagtgatatttatccagaaaactgtccatttcctttagattttccaattttgtggagtacaggttttcaacatatgacctgaagattctctgtatttcctcagtgtccattgttatatcccccttttcatttctgattttgttaattagcatgctctctctctgccttttggttagtttggataacggtttgtctatttgttgatcttctcaaagaaccaactttgtttcattgattctttgtactatttccctagtttctactttgttgatttcagccctcaggttgattatttcctggcgtctactcctccttggtgagtttgcttctttttgctctaaagctttcagttgttctgtcaattctctaatgtgacttttctccagtttcttcatgtgggcactttagtgctgtgaacttccctcttagcactgctttctgagtgtcccataagtttgggtatgttgcatctacattctcattaaattctaggaagtctttaatttcttcttttatttcttcctcaacccagaaatggtgcaattgggtgctattcattttccacgagtatgtaggttttctgcaattcgtattgctgttaaattctagccttaatgcatggtgatctgataagatacagggggttatttcaattcttttgtaactgtggaggtttgctttgctgccaactatgtggtcaattttagagaaggttccatgtggcgctgagaagaaagtatattcttttgtgtttggatggaatgttctatagctatctgttaaacccggttgggtcataacttctgtcagatcctttgtttctttgttacgtttctgtctggtggtcctgtctagtggtgtaagggggtgttgaagtctcctactataagtgtgtgtggttttatgtgtggtttgagctttagtaatgtttcttttacaaatgtgggtgccttcgtatttggggcatagatgttcaggattgagacttcatcttgatggacttttcctgtgatgagtatgaaatgcccttcttcatctcttttgattgcttttagtttaaagtctaatttgttagatattaggattgctacaccagcttgtttcttgagcccatttgattggaaaatcttttcccatccttttactctgaggtatcgcctgtctttgaagttgaggtgtgtttcttgtaaacagcagaaggatggattctgtcttcatatccattctgttagcctacatctttttatgggtaagttaagaccattgacatttagggatattaatgtccattgtttgttggttcttgtttgttttggatttattgttggtggtgtcattgtgtgtggatttcaccctcctgtttctttttgtgtttggtaaaattagattatctatttcctgtgtttttgtgagtgtagttatgttagttgggttggagttttccttccagaatcttctgtagtgctggatttgtggatatgtattgtttaagtctgtttttgtaatggaatatcttgttttctccatctatagtgattgaaagttttgctgggtacagtagtctgggttgacatccatgctcccttagtgcttgtagggtatctatccaagaccttctggctttcagagtttccattgagaaatcgggtgtgattctgattggtttgcctttatatgttacttggcctttttcctttgctgctcttaatattttgtctttattctgtagatttggtgttttgattattatgtgtcaggggggacttctttttgtggtccagtctgtttggtgtcctgtaagcttcttgtactttcataggcatatccttctgtaggttggggaaattttcttctatgattttgttgaatatgttttctgtacctttgagcagtgttttttcaccttcttctatacctactattcttaggtttggtcttttcatggtgccccatatttcctggatattttgtgttagggatttgttggacttgaggttttcttgggttaatgaatgtatataatgtagcgagtcttcaatagctgagattctctcttccatctcttgcattctattagttatactcacacctttagttcatgatcatttatccagcctttccatttccagcatggcctcattctgtgttttctttattgtgtctatttcagctttcatgctttgaactgtttcaagaacttccttcacttatttggttgtttgttcttgggtttctttagattctttaatagatttgtttatttcttgaattttttggtttgtcttttcctccatttcgtgtaattttttacttgctttttcttctatttctttaagggattttcttgtttcctctttaaaggtctctatcatcttgccgagataatttttgaggtccatgtcttcttcatgctctgtgctgggcttttcagatcttgctggagtggagtccctagattctggtggtgtcatattggtctttctgttgttgagtgagatgttattctgtcttcttcccatatcttcttctagtgggtgcaggtggggtctctctatctcctcttgtgacccagtggtgtgtgggggccaggaattctatgtccgaagttctggatgcacttgcctctcctggtagtctcctcactcttgtggattggttggtggaaagggatggaagagtggggtgttaccacattcaaggagctcctccctgcctgggcatgtctaccccaagcaggcaggcacaggcgggggaggaagggttgtggggggggtgggggctctgggtgaatgatggtttggatgggggttgggtaagagcagaagctcactcaccttgttgtggatcagtcagtggagctgtgtctgtaattttatgggtttttttgacaacatgaagctaaaaggaggaaagaacaaacagcagcaatgatgtcacccagtaatttattacaaacacagaatctctgggcaaacccaatcccaggcctcatacatcagaaacagtatttgaatatgattcttatgccttttaatatgttaacctatgtttgtgcatgtttccaattgtgagaagtgatccagtggcttttaggtcagctgctgtctgcttgacttcctatcactttcccttaatatgaagggattctaattatgacatcttattcaatattggtaactgtttccaagcaattcacacatatcttatgttcggctatatttgagaataaactatagctatttaagaaaaacagcattatgaattaatgtcattccaggagacgaatatacgcatgcatcaggttatccccactggaagtaagctgggaaggagacatgtctagataaacacggcttttctagtggtggaacttgtgaaccttttgcaaagacatgttgacttttacatgattctcttgggaacttcttgaaccttcagaatagatagctttgtctgtgctccaagaattgtctctcttttccttagcaggacatcccttcctaggacataagtgatatgctgcctaacttaccaagggaaaatgagacaaaggcaagcacaggtctggataggctcaattcccaatgattttcctgatttttggtctccagactcattcaaaagtcttcctatacttttgttttcttcttttcctgtggttaaaactgaaaaactccagaaagagagatcactggttttcctgccatgcacttttctaacctggatttgaaattgctcaattttcaatcaagaaactacaatttccccccccccttttcctctaaccctcttggctttcttccccaatcatctaaatgcacggacttagccactctctgaattttctaattcccactctccttttgcaatggattcaaagctgcttcttactaaaggccctttctggaacattggaaaaaaagtaatttccacatgtaactttccacagtgactcccatgtaggtaggcactcatcccagctaatttgtgacccaggcactacacccacatggagaaaaatatgttatatagcaggagagtaagccctcaaaatccgaaaattaattggaaactcaataaggtgccgttctggagctattttctcagaaatgaaacttctctgctagagaaggaggaaagctaagaaagtcaggacacaggaggccccgtgctgacaatgtgaagtaatgggcagttgctggggaagaggagacttcagaggatctgcctacaagtgaagcaggaagttacaggcaacttttacgagttactaccaggtgggtccagctgtctctgagtcacccatggtcctttaagtaaccccaggtactcattgactcaccaagctatatttagatgcaatcatttctttcttctctcattagtgctctatgtaaggtgattagacattgtttctccttccctaggaaaactcatgcaacgattgcttgtaataattcatgaaattgttcattatttttcttttaaaatgtaattgttgctaattatggtagacaggatagcatctccataaagatgtctgtctgtgccttaacctcaagcactagacatgtgctaatttccatggcaaaggggactttcctgatatgaccaagttaaaagtcttgagattggagtgagcctaggctatccaggtgagaaactaaaaaggtactcacaagaatgaggccaaaggatccaaatgagaattaggtacaaggatggaatcaagagtttggggtgacagaggaaggggccgtagcccagaattgaaggaagattttgaggcctgagaaatacccagaattagctttgctgaaactttaattttagcttccagaatcttatttttatacttccaactttcagaactgtagaagacacttgtggatttttttatttttgctttgagacagtggcttactatgtaaccctggtagatttggagattactatgtagaccaggctgggccagagttcagagatctgcttgcctctgtctttagaatgctgggattaaaggtgttcacccccagcactggtaaattagcattgttttaagccactaaatttgtggtaatctttctacagcaagccattattctatggacatcttgttagttattctagaattaattttatgcgaatgctgtactattactgccaaaacaataagttgtcattccctaatttttatttactttcattttacagcttaagtgccatcattaccagtgtagtagatgtttagaagtgtggggaaaagctctgaaggctaagagtagattgtcatttgggaggtcacatcctccctttgacatctgggggagagccctgcagctaaagagcactttctagtaacgtttgtggttactgtttcatctcgagagtcaggtgtatataaagtcctattttcccctttatacttgtaactctagatatgttttctagactttggattttgtatgcctatagtaggtatcacatgggattatgaagattatctgaggtaaaaatgaatgtaaaatgcttatcagggttctccctacatggtgactgctgtgtatacaaagaatgctactcactggggttaaagttgcagtagatatgggcttgatccacatatttatttgctatgacttcctctgtcatattatgagtaagcaattgataatataaataataatcaacctgtactcattcatcaaccagaagataaaaatactccaaaggagagaaaaggcattttagaggtatttactctcacttaaaaactctgtctttcttagaaatgagatgtgtttatggctgtgggctacatggaacaaagaactcccactgtacaacatgctgatgtgtgcttagtctgtgggaagtgtttcttaagttgatcttaatctccaaacaaaaaatagccttcttgagttcatcatagaaaattgaagttatagatggaaaatggtttcagcattagatataattatgctcttttagcatctttttatttttgattactcatatttacgtatccatccccccattccctcgccctcctcttctcccatgttccacacccaacctcccccactcctccccagggatagtgaggtcctcaaccaaagaacttcacagtctgtaatattgcttggaggagggtctagaccctccttgctgtatctgggctgcaatagtatccctccatagggagtgggctcccaaagtccatttgtgctctagggataaagactggctctgctgttagaggagccacagactgtcttgggctcctagctggtacccacattcagagggtttggtttggtccaatgctgtttccccagctttacgactagggtctccatgctctcagtaggtcaggtccactgtttacactaaatcccacttttactcttttatgttgccataattctaatggaaccatagagtggccctggattgggattaacatgcctgtgttgtcatctcacatattttataccacaacacagtaactttgggatataagcagaacattgtctcctttgttgtggagaaagtaaatcacaaatagcttaagtagtttgtcctgaatccacagaataaaaggtgacaaaccagaatccactctcaagttgttttacctatgtgatctgccctctttcctccttcatctgtttcctcctcctcttcgttttccttctctttctttcccttctcttcttccacatcctcctcctcccatctctttcttcatttcctttcctctttttcttggaatattaactgtacaaaagacaatgggtttcatagtgaagttttcataagtgcatgtaacacattttgatcatattcactactttattactccctcttaccctgtcctcttttattctttcttcctttcccctacccaagagtcccctctcctactttcatgatgatctcagtctgcatcattgacacatcttgtaaaattgactccattgctcttgggaacataacccatgggagaggaaggttctaggctcagatgtcatggactttcagatgcctcttcttgttctcaacagtgacagagatgctggcactgtctctaagaaacaacagcaccaagatcaaagaacaaagtgagggaatacttcaagcaagaggttgatgcaaatgtccaacctactgagccacaaacgaaagagaattgtcagtatcagtgcttcactgagttcccactgactggatagacatcttaacagaaccacacggctgttcacagaactgtttccccacttgccactgtatcagcaagaaagcatgtagttcagataggtcatcactgaataattataattatgattttaaccagctactgaagagttggacaatattaattagtgactttccattctggatagacattagaataaccttagcagacttatgcctggacaccacacacagatgatctaatttaattggagcctgagaatgaatagttatgtaagttctccaggtgagtccagtttgagcacatagtctctttctgtttgttctttgggaagaggaggaggaggaggtcttccctatagcagcattgcctggaaacaaaacccttagtgacaattcctgctagaaggttggactagggcattttcattctgctgtgtctgaatcatatctgtgtagccccagtgtgctggacttttctataacataaaagccaccaccttgaagggggtgagtaagcatgcattcctggcatgaaatattacatgtttgtagaatgagtgcaaaaagaaaaggaatattctgttttctttagactcttgtgtacttaattttctcttacagaaatgaaccagaagtgtctttctttttgaatcaatattaactttggtataacttgtgaatattacattatacaaaaccttgtatagactgcatcttaagatgtaaatataatcaagtcaactaatagtattgaggatctgctctgtgccacactgaagcaaaggctttggatagacacatgagtaacacaaattaagagtgttcccaaggttcattgtgctataagtagaaacaaataatatgcagagaaagtacagacagttatggaattttaatggaggtgtctgtgtgctcaattagggtgaaagaaagcagattttgtaccatgagagccctggggtagcttttaatggccagggtgaaagcacagaactgatttcatttttctcgtgttcttttgtatgactcaaggacaagtcccaccagaagctgctacttttactgagcagaatattggagcacagaggctcttaataaatgccacttcctcttttcatgattggcttgcctatatgcccttggctatctatgttgttttctggtctctgtcaccatgttcttctcgttggccaccactgctccgcatcattttcattgctgtaacaatcagcactcataacatggatcagatacctgctaagcactctgtatgtatttaccaattcatttactcagacagttagaggcagctattgttttcctccagagactgatcctaatggaataaaggcttgtggcatgataaaggccattgagctaccaagttgctgagcatgtgtttaagacaagacaattttgtttgaaaatccatgcacttaaactttatcctattttggctttattcacatcagaagtggactgacaaacctggcagggacttcagttattctaacagaaacataagcaaagcctgatacatttctgatggcaaatcccaaagctggtggtttaactcacacacatatcctttctgttttccttgagaggaaccacttaggtggcatctcacttttgaacataggcgttgagctcatgctctgtgtaaaacaagctctaatcattgaaatcattttgttcttagaacaaagtggccataatttcatgtaggagctgtcttctctcattgtcacaagcaagcagttgccttggtaacagcatttgaaaagggcaaagaccctgggaacttctatcaaaagccactaaaatgcatgcagaggttctacctcagccaggcctctgctaaccactttaccagcctccactgagtcccctgtggccatgttagagggtaggcagaacagagggtgttacattgatgctttggctgagccaataattagggaatgtagaagttggaaggattttaaagggcaatggctttaagaatctcttctgggagacccccagaagatggaggttccttctttcagcagaagtcccttacactttgcctggatctgatggttgccattctttcattaattaagaaggaattcatactcattttttatgtttccttttattgaatgaaaataaattcttttctcacataatatatctttattatagtttcccctccatccactcctctcagtttctccccatctcgcttccccctcagatctactccctttctgtctgcttttagaaaaaaaaaacaatgttctaagagataaaaactaataaaaataaaatataataagatggagcaaaaactaccatattgaagttagacatagcaacctagctggagggaaagaatcccaagtgttggtgcatgagttagaaacccactcattctcacagctaggggtttataaaaatactaaactaaaagctataatatccacacagataacctggtgcagacccatgtagcccccatgtttgtccacatgtgccttgtctagttgattcagaggactttgttcttgtggtgttctccacccactctgtaccctccactcctgttgtctcctcttctgcaggattccatgagctgtgaggggaggaatttaatggtgacatctcatttagactttctctgattaatgtttggctgtgggtctctgcatttgttcctttctactgccaaaggaagcctgttctaatgatgatgcatactttttaaattttttttactttagaccaatagtgtttggtcttaccctaggtctctgggttaactagtctctggttcttgcctaggcaagtagtgtcaggttcattcttttggttctcacagagtggattttaaaccaaactaaacattggttagttactcccataagttctatgttactattatccttgcatattttgcaagcaggacagattgtggctcaaaggtttattacctttgttggttaatgaaggagctttgtaacctgtgaggttaaggtattctttattaaataaacacaagccaaacaagccagagcatgccaggggcagcaaggcagggaggtcagagagaaagggctcccatgtgccttgtctgtccctttaaaccctatctcgagtcatcctgacctcatcttgaccacgcccatcagggtgtggttaggcacacctgtagccagcttctagcaggcatggcttacactgtcccctacaattccccttttagtctaaaagaggattaatgcttaacagtgtaaagtatccaaaattaacaatcataaaggtgaaatacaagaagacacaataatctgctatgacacatcctaactatgtctacattagctaaacccgcaagtcatctgaaaagaggtgtccaagcctggacaactccttccaatcccaaccataaacaatagtaagctatctctaactagtcttacattaccctaatagacaataatgggggagggggaatagcatcctccaagttacttcctgctgaaatgggatggcggtagcctcctgggggtcctatgggaagaaaatgttagtatagtgaaagtctctaatggattataacaatcaagcaaatcccatggactatgttacaactctcagaatggctaagggaataaaacaagtggcagctcatgctggtgcagatgtggagtaagtggaacactcttccattgctagtgggagtgaaaacttgtacaaccactatggaaaccagtatcttggttgggaattgatctacctcaagatccagctagaccactcttgggcatatatccaaaggatgctccatcctaccacaagaacccttgctcaaccatgttcattgcttctttattcacaatagtcagaatctggaaactatttagatgtcccacaagagaataatatataaagaaaatgtggtacatttatacaatgaggtattactcagttgttattaaaatgacttcatgaaatttgcaggagttcttactttgagctgacaaatctatgaccagcttctgttacagggtcccatgggtctcccttgggggagggggctagtagacagcactcagataattgggagcagatcaaagcaacaagcttagcttattaaggaaggggtaagccatatatatgccccaccttgcctgcagggaggatctgttgtgctggtatctgctgatgtgatgtggccacttttccttggtccacatcatctcttgccaaggctcaactgttgttgtcaaggtcctcagacagaccaaggttggctttcaggaagtacttactatgcatgctcttagggccaatctaggtatgctggccattagggttataccacaagcttcccttgaaagttttcctctctgacatcagctctattgtttggagtaacatggaacctgcccggtatcccttctctggtgatctatctgacacttggggacaggagacacagtttttctctttgctttctctagttcctccttgattcactgtcagttgtatgttttaaaaacaagtcagcttctttagtgctcccttataaaattttggtattgtttctatatttattgtaaaatatgattctctttgcatatagttcataccaatcagagtctgatacaatcatcactcccccatattcggatattattatcctacacataatctgagaattatgtttttcatgggcacattgcatagcttgtcctacaagaactaaggaatagaatgatctatttcactcatttgtgaccagagagtcatatattctataacaccgaaaagaggtatgcagattattttgtatgaaacataaattaaaatgacatttatgcttccatttgtcagtgtgttttatatgaactagattgacagcatactaaaaagcatgcatggtggttcaaaggcatgttcctctgatgaagtaggcactctgttactggttgcaggaagaaatgtgccttgagccccactgacaggacatgcttaaactgtcaatgaagaaaataggaacaaggcagggtggtatttggctttgagtttcaggctcaatggggtgactttttctttgtgtttcagaaaggaacctaagaagagaaagcagagaaaaggccatattgagtctcttctctccatcagagttggagattatgatgaagtgtcactttcttcctcctggcatatctcacagtgtgggagaaaaaagaacagtcaactagaagtagacatagctgagtctgaactctgactttagcatgtactagctatgatttgtcttgagggaaaaatgtatgaactacagtatcacatatagaatggtgagaacaagtaccttaaaatgtggtatttgtactgcgacacacaagttaatttgacaggcccaagtagtcattcaagagaaagcaactttcttttctttaagaattcttgtctgagggtttgagagattgttcagtggttagagcacttgctattgccatgcaatcatgagaactggatcccattcaaagagctggtgtagcagaaacacctgtaactctagcacccagggatctgatgtccctccttgacatccacatgtacataagcatggttaccggcccataccagtgcacatatttacacatgcagacacataaataaatctgttattgtctgagataagtaaagcaccaatttgaaaatcaaggccactttcggataataaaatattgttctatgaatcagtgttaactagaacagattcaggtcctaaattagacagagagaaatgctttttactgttttattcatgataagcttctatcaaacagagaggaaaaagccttatgagaaaagatgttagaacagcactagggagataaatattttgggtaatttgagagtgtgttctagaatgatgtctcatttaagctaaaccttgggaatcaatagtagtttgattggcagaaattgcaaggagtcagaatctcaggtgagagtaaaagggatggagatgaaggagtaaagagggggagtaggtcactgcacaccggtccaggcattcatgctttctgtgttattgaatctttctggttattttttgagtactttataacacagacacacagaaatactttgatgatattctgagagccttcacttttttccccttgcttttgattaaaccggtcttggtgagatgaagtcaagggctctttatttgaaattattgtatgaattctcttgcttttctctggccctgtcaaatagattgagaacattcacagctgtgaaagttgggagcatcgtctcaggggaatgaaaaaaccaaacgaacaagaaaacaactctgtagcataaacttaacaggctgcatctttcagtcctatataaatatgcataaatctacttcttaaatagtagaggactctcaacaaacaagcttccttggtcctttatagggaggaccctcccagacaggactcagctggatgctctgttaagatttcatgtatccataaatgcttatactgtgatgtccaatccttcagtttataagtagcaattatattaggaaataatggaaagagacttcttttttcttggatggcaaatgcagctggaagttcttagtactaatgcatactgctgaaaatgttattactcatggtcttctctattactttatctattacacatccgatgttcactaaacagagccatgtctttatgaggtgaagctgccttagaacaaaatgtaaacaccagtctttggagtagatgactgaggcagataaatgtagtcatttacccaacataccaagaaagccttgatagggagctggagaggaagtgaaactgctgtatcttgtctgtgtttactgaaggccttattatcatcctagaaaattagattataatgttttgttgtgtttgtcgtatgtgtttgtgtgcttgtcacatatatacatctgtgcaccacctgtttgcctggtgtctgtggaggcctgaagaggacattggattccttggagttacaccatgtgggtgctgggagttgaaaccagcttctccgaaacagcagccagtgttcttaaccattgagccatttgcccataccccaagtcaggccttcaattttaggggacagttcagcaagactaggaagcatggtcagtaacccaggaagccacgccagcaatctggtactctggatgctttgaatagttactggattacagtgagttcgagactctgtatgtttgatctttgttgagaagctagctgacctgatgactaggcaacccctgttttatgcaatctgaggcctgtattcaggaacttaaaaatgttttatttttagaattctcagtgtgtgtgtgtgtgtgtgtgtgtgtgtgtgtgtgtgatgtatttacatttgtgtgtattggtttgtgcaggagcatgcgtatgcatgagtgcatgcagctgaaggtcagagggtgatgttggacatctttcgctgtgtccctacaccttatggttttgagtcagagtttctttctgaaccccccagctagactggcagaccagcaagccgaagggaatctacctttcttctcctcccttcaacatgcacctctgttactattgttacacatgtatgccactgggcctgactttttacatggatgttggcaggtatcgtaaccactgagtcctcttgctgtccctttgaatctaggatttgttactggatgtttctgcacccaaatatgatccaggctaaaaatggccatcctttcttaagtctatggtgatgtgttttattttatttctgtgcttgctaatatattgtttttgtaatcaggaagatactcatttaagacatagcacatattgagatatataacattaagatataatggtaaacacaataagcacaacccccagggaactattgcagaaggcattgttaaaggacattcatacatttataatccagaaagttttaagctgcttggcaaaacacctgagatgtacgaaatttgaatggaggagtgaaattatatcgaaaatgtacacttatataaggaaataatataataattgccagaattctcttgtacttattgaaaataattctgctggtcatcagtcatcaaagaattaaaagataagcactgagtcactgtggaaattatcttctgggggagcagtggcattgctcctgttccttaacacatgattaaattccttaaaaacatttccatgttttataaagacgtgtaaagtattttgttccccagaggctcaatgacttcagagatggaatggcaagaggttaagttagtcttgtatgcaggcaagaagagacatttgaaactgggagaagctaagcatgggaattttattgtatattctgtgaagctcacatttcatttctaataattaataatgtgactttactttgaaaatcgttactcatggggaactcttaaaaattcacagccaaacaaaattaaggggtagatttttcaggatcatgacctgcttcgacttcagagcaaatgaggtaaaaggtggaatgacaatcacaaagaagaccttggactgaacactaggcatctgcagaattgtacagactgtaaagcaagtccatagttcatgacaagagatgaaaagcatgagcacattaaagccaattaaacagaagggctgaagccgaagggcatggacaccagcgaatgcagggagtatgttttaagaagggtgtcatccagtagttcaatgctgtagtctccaatgcagggactgggaataaagaaagcacccagacttggaaactggaggacaatttgattatcatagatgaatagattaaactagatcaagaccagaaatttctggagaagtggatcacctcttgtgcttccttatggggaataaaatagaattactttttctccatcatctagaattgaggactacaagatctttcctttaagagggccaggtcctttatcattaagtgtttacagtgccttgatgggggaagttctgacacaagaatgctagagagcaatgtgcttgctttctgaagtgtgtgctctcaaactcaggctaaggatatacaaaaacattgctgtatttatttctaaagcaattattctgtaatgaaaacatgtaaatttatcataccattatgacagatgtagtggaaaggaaatatggccttttactacctccctctcccacaaatgacttctcaaggtcctatgtgacaagcttctctgaaaggatgaaatgatgtaagtaaaacaattctacccactccagacacacacacacacacacacacacacacacacacacacacacacacacacaccaatgcatgttagcagttgttgtcgcttgtgtccgcatcatcattttgatctcaagtctaggatgaaacacgtgcaaacaatatcacatacagatcaaaaagtacaaggaggagaaggtacactgctcagttgccagaccggtaggcccagcatgccaaaataccctaatatctctgccttctcacagttgtcaacaattaaagatagattatcatctattccaggggcaaagccagagtggtgtatggatttcatatagtgattgggcttacagtttgcacttcagatatcacaagccacatgctcctacctcaaccaaaccaagctcctttaccataaacatttctcgtggtagtattgtcaatgctctgatgttgtgaaactctctgcacatgacagaatgacatttcatcttgctctcaagtgacagtcctttgttgttgttagccatccttccttaaaaatatcagcgaagttcccagtacttttctcaatttataaacaggtgtctgttgtgtatgagttggttattcaccttctgttgtcaaggtggatacttactgagttgtgatgtgatgactccctgtgtgtgggaggaatcaaaatagttacaaggcatggactaaagatcaagtgttaagttttaatggggatagtaaaaacttaaaggccaagatacagcaagaaaaagagagagacagttttttgttgtcctgtgatgtagggtcagggaaatccactgggaaagcaggcctatgcttctccagtgggctccttttcaactctcaatttctttttcagagggcaaaactgaaacagattcttcaatagagaaataactagattgtttagctgccatctgtttttggatgtgttaactactgaaggggaaggtttagtttctgactctgactcagggaaagcttttgctgggaagtggggcttcgggttctataagaaggccagctagggtggtaatccctgattctggttaaaaagcaactagtttgctttcattgctttcacttttggaaaaatcttctcattgcaatcaatatactgtataatagtgagtgggaaatgattgatattcaataactattctagccaataaagggattgatagctgaaaaaagtagtaaagaagcctggaaaacatgtgaaaattaaagtttactattattataattccaagaacatactcttgagttacctagtaaagttattactttatgtcttggggggattagtttatgttatataatctgaacatctatgccatgttctagtttctgaggaacttatggctatcaattcttggtgaaacataggtgtccgataagtcatgatgtgacatttcagatctctgggcagttatatcctgtatttacctcaaggaaactcacacttcccaaaatacacaatgcacacaacacacaataaaaagaatatatggaaaccaccacttattctctgactttctctgtttggacactatactctttgacctcagatccttctggggatagtagaattagtaggtatgaaatcatttgcctaaggaaatctcagatactgttctcattctatgccccatctcaccaattactaacacacctcagggattggtagaaacctggggatgaatatattgcttccaccctctacagagtctcttaatgaaaataaaatatcagagcttcccagagctactagtagggcacagccaaacgagcaatgtgaagacatggaaggtgggatgatagaattggaaggacctggagatcaaagaagctgtgatgagggaagaaggtagaagagttgcaagtgggactgtatttggtgaaggagtgtggtcttcaaggaggcaattatgatgatcaacccaaacagcaggcttacaagatgttttatggactatcttctttctctcttttttatttttgttttgaatacatcctgtgaaggtgaaggtgtaatgatttcactggacccaagataaatgataaatgggtacttattggggaacacttacacagatgggagcacttctctgcccttcatatcggattgtctgacccaagagagagagctggcagcaccagcaagaccatgcctcatgcttccctctttttgcttctgtctgcctaaagccacacccaaaggggtgtggccaccattacaggttcaccagcaatatgcctctacaatcctgactgtagttttccctccattcactccttccagaacccatacctcccctctccccaagatacactcctcctctgtttcccttcagaagaaagaaagcctcccagatgtcaattgaacatggaacaataagatacaaggctggacaaggcaacctagtaggaggaaaaaggtcccaagagagcaggaaaaagaaccagagacatccctactcccactgttaggagtcccacaaaaatactgaaccaaaaaccaacatatatgaagatgaccttgtgaagacccatgcaggcttcgtgattgctgtttctgtctttgtgagcctctacaagcctgcttagttgactgttttggctataggctgttgtcctcaacccctctggctcctacaaattttctgcaccatttcccaagctccaaggggagggacccaattgggctctccaatttgggctcctaattttggctctgggtctctgcatcttctcccctcagcttctggcagaagcctctctgacaaggattgggctaagcaccaatctgtgagtatagcagaatattatttgggatcattttattgatttcatttttctatcctagatctctgggatatctagcctccagttcctagttatccaaacagtgtgaaagcatgtccttcctccctctcatggtataggcctcaaattagaccagtcattggatggccactcacacaaactctgggccaccattgtgctctcacttcttgcaggcaggataaattacaggtcaaaacttttgtggctatggtagtgttctagtcccaccactggaagccttgtctggttatacatggtggttggttcttggctctgtatcctctatttctaggagtcatcactaggatcacccaataggatcctgggagtttcttttcatgggtatccacatcttgttccccaaataccctctaattcatctctccttgtattctctccctccattcctctccctcccacctgatccctcctgttcccattcccacccacactcagtctacccacaaaatcaattttatttccccttagagcccccccccttttttttgtctttctgggtctgaattaactcacctgggatgattgtttttcttttttctattcccatttagtctgaagatttcatgatactatttttttactgctgaataatacaccattgtatatatttaccacattttctttttttatttaaattagaaacaagcttgttttacttgtcaatcccagttccctctccctcccctcatcccctctcccctcctgccgaccacctttcctatcccctttctgctccccagggagggtgaggccttccatgggggaatcttcagagtctgtcatatcatttggggcagggcctaggccctcccctatgtgtctaggctgactaccagtgactaccagtgaccccatagattgtccagacctccaaagaatggaatttgggagcccctctacatagaaggataaatactgttccactgtcagaggcctcatggatttcggagacctcctcactgacacccacattcagagggtctggatcagtcctatgatggtttcccacctatcagtctgggcttgatgagttcccccttgttcaggtcagctgtttctgtgggtttctccagcctggtcttgacccctttgctaatcactcctccctctctgcaactggattccagagttcagctcagtgtttagctgtgggtgtctgcttctgcttccatcagctactggatgaaggctctttatccattcctcaaataagcaacatctaggttgtttccactttcaggctattatgaataatccagctgtgaacatagttggacaagtgtcattgtagtaaaggttctcaccagttccacatctgatagatggctaatattaaaaatatatataaaaaaaactcaggaaacttgatatcaagaaaacaaatgatctcattaaaaatgagatacttatctaaatagagaattctcaatagaggaatctgaaatggcagagaaacatttaaagaaatgttcaatatccttatccatcagggaaatgaaaatcaaaactacttttgagaatccttacaacctggaaactcctagcaacccaacggcaataaagaccaaacacggtcatcttgtcatctttagagagctctcagttccatgttgtaaaactagagtctcttctttattttccatgtttccgactgtttcttaaccatggttctgtggccacaaggagatcatttctgtcctcctgttctcctctctgctagatggcccctagctcttgtcctcacttgttacttacacacctagtacctccacccaggtgcaggcttattcagatgcttaggcccatagagatgcaaagtaggaggcattccatactgaggctatgctaaaccatagcagacttgctctaattagcaatacaataatgggcctgagctctgggttgctcctgtttagtgaaatcggaggctggacatcaaaacatttcataatggaactattttggttccccacaagaacgactaggattagtagcacaagtggcagcacatgctggtgaggatatggagcaagggcaacactactcctttgatgatgggagtgcaaacttctacaaccactatggaaaccaatatggtggttcctcaggaaactgacaatctacctcaagatgcagaagaccactcttgggcatatatccaaaggatgcttcacctttctttctcttttaaatttaattaattattataattgaaaagttttaaattttgtgttaaaattaaatttctttcttcccctttctccatctaaaccctcccatatattactcactactttccttcaaatgcatggcctctttttcactaattattattgcacgtacatatgtatatttattaatatgatttgtgtgtgtgtgagacagagaaagagagaagtctgtaggatatgcctgtagtatgaatatgagatatgaatcagaggagaactttcaggagttgtttccttccactgtgggttctggggaacaaactcaggttgttagtcttgcaagactagcccttttactcccccttgagtcatcttgccagatctatttcctggctttttcattcatctccctggccttccacattcttcacattctactcctctgaaacacagatgattttatatccagtgttagacccccgaaaactcaagtatccggggtcccaggccacgttctcggtcaccccaatgaccaggcagatttgagagcttgctgcaaactgcacgaggctttattgtaatttaacgagctaaccccatgttagctccggtcttttacccacccaccatggcagatggctagaaaagattcgaagccgctgcgtacagatctttatagggcagcgtaaggggagtgtctaggggtacgcacatgctcatgattggtgtgcctccaggcttggagggcttgccctgtgttgattggtcaactggttgttatggcccataggccctcccagggtggttgctatgctctctacgtcattgctgtgcgcttgtccttaaggaaacccagggtcgtaaagcatagcgccaccagctaacttccgattggttccttgtcaccaggcaggcatcagactttctagtgtctgggacaaggtcacagaagcacatgttcggctgttatggctgccaaaagggaagctggtcccttcacagtaactcaaaatttaattgaatggttcaagccatggtggagactgcccatttttctttgacttgtaattccaaattccctttggttgacaatttgtctagagtgggtcagaatttaactaacttccaaacaaacacatgaaccagctagaaagctggttcatgcagtgaacgacttgagaagtcatccctctggatggtagataagagagaaaaggctgtctcaatgaccaggtatgcatctctgtggacctatcctgatggagagagacttcagtagggagggggcagaggcagggactaagaggaggttgacaactttatgctcctcctgccttttgaatgagactcttctggagatttcgaggaagaaggtaacaggaaaccactggtttgggtggacattgtatggatgaagagctaagagcagtttctgactagtttaggaaaacaggtcttaggctgctgtgtgcacttccttttgttcttttgtgtatcctgtgaaaagggggatatatctcaagacagactgagaggaattgaatgtactgaagagtactaattattccttaaagggctccaagttgatcttctcatacccgtattacagatcatctgttaccatgttaggatagccctggaattacaccagactctttttaatcttggccctaggactttcctacataaaacttattatctgtgctcctttatccagtgacattttctttgactattatattgagaagttaaactatgttagaggctttcttttttaaaataggggtgcattactttcacttgcacattgtcatgcgaataaaaagatcttcaaaggctgcagtaggtaagaaggacagcttccctttgctgaatcctgctgatgaatcttaatcaaaatgttctttcccatagactccaagcttctgaaacatctttcaaacaatttattttagagtctgtgtttcatttaagtccccgtgcatatcaaaatcaaatattaagttcagagactttcataccctccccagggtgctctccattcctctcttcatactcaaatttctccaaaatagtttcctttttttcttttctattatttagtgatgatttctgctgggatcctttcttagaagtaaggaaatgagattgatagctatgaggattggtttgctgcttccagggcacagggttttgtagtaggtggtcccttttcagggaatgaatacactaatgagaaatatatttttttctatgaaattacctggatttggcttttctaccttcctttatgaggaaaaaaggatttgtcataaaataaatatatcatatggtttacaggtgttcttgttgaaaatttaatctccatgttcatattataatagcacttgtgtgcgttggaggggaggacttgggaggcaaccagaattggatatcataagagtgacaagtcacatgagctcatgcgggtgcagcacttatgatggaattggtggctttataagaaaaagagctcctgtgttacatggcttttcaatattctttgctatgatacaggcagcaagtgggttctcatcaaaacagatatggggaagatgctggtgtcatccccttggacttcttagcctactgaacttattcattacaagttatctagtcttcaatatgcagttatagcatatgataataaactaagacatatggtttatagacttcaaacaatgcttgagaatggagaggaaagaacctactttaaaaaattcttctgttgcttgggagtagtatattaatttgataaaatacctaagcaaagggaaaaaacattttaggtgatggttttagatgttttggtatttaggtgcttagctctgttagttccagacaatgttgaggtagaccattagagtgtggagtaaagcttctcactttatggcaatcaggaatcagaaagagaggctgaagacaaggagtattcttcagggaaggcatcagtgacctacttctccaaatatgccctatattctagtttccactactttctaataatgccatccaattacaaatctgtcaatggagaactccaaagaaatcttcaaattgagaattttttttttagtttaaactcttggaactttcttttgtttgtgagaaaaggtgcaataacatttctattgttctggtcttgtttaatgtagcaatttctaggacagactttcacggcagacttcctgatattatagctctgaaaaatctgtaagctcctcttctgcaatgtttcttgagccatagatgagttgtggtatagatgtaactgttgggaataggcttctcataatctgttgctgaactatatcctattgtggttttctgtgatgatctttccagtgtagagttgtcagccttgaaatccatataaataaaaacaaaaaatggatgaagtagattgtatcatctatctatctatctatctatctatctatctacctacctatctatcatctatctatccatctatcatctatctatatatatggacacacgcacatatatgttacaaatgtaataaaagaaaaaacagtctatcaactttgatatggggggtgtcatggcacaagttgagggagggcacctaggagggcctagaaggaggaaaggaagtgggaaagtaatgcagttctatttcaattgaaaacattaaaaagtaaaggagagtttcaattctgtagcttggtccattagacttaaatctttccctgctctccaagtcacctgtctttggcttataaattctaatcatgttggtgccattgagtgtttcccatttattttcttttggggtgttccagtgcatcccactattgggatgcccctgtgtctcttcgatgccttctcatatttaacctccgcattccagtgtcaattccacaggtcccctttactaccctcccttaatgagatcaaaaccctccagcactggtgtccagaatgcagcttccacttgccagcacagatgtgcaatagaaagttctaagcctgttttggtatccccattgtaactcaagtgctaggctcacattgacatctctaagtcaagaaatagaagtagaataaacgattgatgttaaacaccctcccatttgaacataaatatatgaacatatcacttagttaagagcaacagctgatttaaaccggggctccttgagatcttcagctgctcagcacacattctaatacacttccttagaatatgaaaaagtatgatcagtgaatagcgattcaccattttcaaaaacactttactgttttatcccacttgatcctttcaaggactttgtgaaataaagaggttgttgctgctttgtttactggaactctgtaaagttaagtgatttgtgcaaggtcagacaaagatgaagcaggaaggagaaaagagccctcatcatctgaatcctactgaggagaaatgatcatagtagtgataataatagcttgaagtatttcaggtgatatgcttagtatttttatgtgttacatattttgcatatatacacagtttatatgtatgataaaccctgtgtattgtgattgattgctgtcttttctcaaaggaggggaaacctgagccttgtataagttatataacatattgtaagtggtagatctagacctaaaaatgggaattttgccatctgttctttgttcctaaggacaatgtgtttggccttgtgtctatttataaacatttctatcttctgagattccatttctgtcatgtgaacagtaaatagtcaatgaaaacagtatatagaatatacatatatatatatatatatatatatatatatatatatatatatgccatttattcttctccaattacaggtacattttaatttctcaccattctctttcctgtgtttctttcatcacagaatgcaatagctggtttgaagtgatgaaaaaataagcatgaactctgttgaagagtaaatctgatgtctatagtcatgtattttcttgttaagattgtgatggaatgctcagtctgtctcttttccaatctttagtgagctaaactacccatgacacttatcaattgttaatggttgaagacatctgcattgctctggtcggctcctgtggccaaggggaaaatgatcgggactctgttgtcaccagacagtcacacaaatattgcatatgttctctcacatgtggaatctatattgaaatttatgtatgtgcttccatacatgtgcataattcactgactcacacacatgcatgcacatgcactatgcactcacactcacacatacatacccatgcacacacctacaaacacacatacacaggcactcatactacacacacacatgtatgtaggaagtgaaagtaggaaaattaaacagaaaaagatctaaaggtgtgggtggggttggcacaagaaaaggtaatggattatttgtgatgtgaagtagaaggggttagcataatgacaagagcagaaagagggggagacaggaatgaagggagaggattgtggtggcaataagaataaaatgtaatgagatatatgtgtgaaaatatctcaaagaaatcaattctttagatgttaattttaaaaattaataataaaaagaagaggtggctattggacccaacctggttatttaggtgtgtgacacacacaattcacctaacagctctgaaaaccaagtctgtaaggtgagatgatagttttgcctttggaacagtcatcttgagttgtgaagcatctttgttttataattcactaacactttctcaaagagaccactaaagaaacagacccttctatccaattagccagctggtgctagtggatacggtaacttttcaaatgggcagcacatcaagaagctgggaaaagtcagcattggtggggaatatggcaggctttgagttgtagctggcacactgacctgatgggtgatcactaggggtgggagtggggtgagggtgaagtggggtcttaccagcagcttctcttggtctcttgtcagagtcatcgggaccggaaattgattttcttattttcaactcagatttgttgacagtgcttcctggaagattttatggatttcatgccagggctcccagagacaggctacatgaattacaagtatcttttgtgctaggagggtgatgtggcttcacttgttgtgcatttgccatcctcaccttaaacctaggcagagtgatgacaaagatgctcagagtacagtgggtttagaaacccactttggtggatgaaggtgctatgatgataattaaggcagtcatcaatctgtttccagaggaaggccagttcacatttcctttctactattgcttagggtcttagctggggtcatccttgtggattcctgggaatttctctactcccaggtttctcactaaccccataatggttccctcaacctagatatctcttttcttgctttccctctttgtcctttccccatcttgaccatcccgtttcttcatgttctccttcctctttcccttctcctctcccctccccctccactgtgtgttcttctccacccatactcccaattttctcaggagatcttgtctatttcccctttccaggaggatccatgtatgtctctcttagggttctctctgttacctagtttctctggggtcaggggcaataggctggttatcctttgctttatatctaatatccacttatgagtgagtatatactgtaatactgtgtttatctatctgggtctcatgcaggaaggttttacctaattccatccatttgcctgcaaattttaagatgtcatttttttcctgctgtgtaaaactccagatgcagacatccacagttaagcactgggcccagatcccagagtctagtcgaagagaggaaggagcaataatataagcataggggtcaagaccatttttggagtatccacagaaacagctgacctcagctagtaggagctcagtgactccagactgacaatgcgggaacctgcacaggaccaaactataccctctgaatgtggatgacagttgtttggcttgggcagtctgtggggccactgtcagtgggaccaggttttatccctagtgcattaactgcctttttggagctttttctctttggagggataccttgctcagcctagattttgggggtgggccttggtcctgcctcaatgtgatgtgccagactttgttgactccccatgggaagccttactctttccgaggtaaagatggggaatggagtggggacaagttgggcagagtaggaggaggggagggagtgggaactgggattggtatgtaaaatgaaaaaaagattgttttaaaataaagaaatagaaagaaaaagaaacctaccttgatcttgttcaattggatagtctctctctgccttttggttagtttggataagggtttgtctatgttgtggattttctcaaagaaccaactctgtttcattgattctttgtattgctctttttgtttcaattttactgatttcagccttgagtttgattgccaccccctactccccatccactcttcatagagggtgaggcaacccatgggagtcaacaaagtctgtcacatcacactgaggcaggaccaaggctctccccccattatgtaggctgagcaaggtatcccaccatatgaaatgggctccaaaatgccagagcacgcactagggataaatcctggtcccactgccaatggcctcataaattgcccaagccacacaactgtcacccacattcagaggacccagtttggtcctgtgcaggttccctcactgtcagtccagagtcagtgagctcccactagctccagccagctgtttcagcgggtttcctcatcatggtcttgactcctttgctcatattatcactcctccctctctataactgtattccaagagtttggcccagcacttagctgtggatctctgcatctgcttccattagttactgaatgaaggttctatgatgataattaaggcagtcattaatctgattacaggggaagatcagttcaggcacctctccactgatgcttagggtcttagctggggtcatctttgtggattcctgggaatttccctatgctgggtttctcacctaccctgtaatggctccctctatcaagatttctctttctttgctctccctccctgttcttcccccaacttgaccaggatggtgactctctttttaactgtaggtatagaatgaaggttccttacttatacttccagagacaatattcctatcagttgaatatttatttggcctttaacaatactcttgatagatttttattatatttcttcactaaaattatttcacacagctctgaaaaatcatctcttgccactgccccgtattctcgggtgtggaaactgaggcttagaaagcttattggtcctgcatcagtgataatactgatacatggcttcttaggacttattctcaggtgtttttggatccattcctgaactctcttcttacttctaaagcacaatggccaagggggtgattatgctcaacttggctaggatagtataggctacttactcaattctatggagcaaaggggactgctgagtgtttgcctcagtttcattttgagactattgttccttgacatttttatggcaaggtccctttgagaatgtcggtagagctttaatgatgtggccaatttaacaggttgttcttatatccaatcatttggaaaaaaaaaaaaaaaacctacttaggaccaagccttgtactgagcactgagaatagagcagtgatcaaaagacagcactcctgctctcattaagctctttgtagtctagagggcaaggaccattgaagaaatacatgacatcatacagggtgtgagaatcaaagactgactgaatgattacttagatgataaacacaagaggtctctcatatgagtaacatttgaccctaaactttaataatatagtcagtgaatcatggatatatacagtgaaaatgttggcagaaacgggtagtgcaatcatcatagtgctgccaatgacatcacagtattcttttgtatcatcatagtgtcccatttccataaaacaatgcttcactgtgccatctctatgccccactttgccatcacaatgcctcactgtgccatcacagtatttcattggaacaccacagtgctgtcttctgctgtcacaggctgcatatgacatcatagtattccactgtgatatcataacactctattatgaaaccacaatgttcttctgtgatatcacaatactgcattatgaggccagaaggctgttctatgacatgacagtgttccattgtgataacacagtgctttcttgtgacattacaatactccactgtgacacaatactcctccattttgctgacatatgttgtattttgttgtcataatgatacatgtatatcacagttttgcattgtgacatcataatgcttcattatgagatgaaaatgttccagtgtggcatgtcaatattccatggatgtattacaaaattccattataagatcacaatgcttcactgtgcctttccaaggctccattatgacatcacagtggtgtcttgttacatcaaagctcaattatgacattgcaatgtgatcacagtgctccattgtgatatcacagtcctccacaatatatatgagacatgctcaaggataggaggaaggccattctggttggttggggtgaataatatggaaggaagaaataatggtatgccttctggaagaatttgatataaccatataagtggctttagagtatgcttaggattctatattaaatacgatggatacccataagagggatttaaattcagatcttatgtagtttcctttttttgcaagactctctgggacctgaatgatacaattgtgggactgggagtgatggaatctagcaatccaattaggtgtttagcatagaaaattgggcaacttgaaaaccagtggacagtggacgtgggtaataagaagtagttggcctcaaaatgtatttttaagctagaccagaaagaatgtatatacaaactagatgtgtggtgtttccagggttgactcattttcacttatgtacttgccactgagtacatggttctcagaacttattcaagatgcaaacttgagacactatcattctcactttcacactgtcttcacattgggccaaggaatcgttttgctgttgagggtatttcttccaggtaggggcatctctgatgccaggtcttctgttactcatcacccccagtgtgtgatatcatgcagttattaggagacagatcataaattcactttacttatgggaattttaaccaacaagagaagctgttattcacactaaagagtaaacaaagtgccatactagaggtaaagaatgccccaagggaacaaagatatgagtaataggatctaaattgggtcagtagactaaaaaccattgtttgcaaggaagtaacagaaggcataaactttaaataagactatcccaatttcatgtccctgtctcttcatgatagtttcttatttcttgtccttgtcctttcttcttctgtggttatcagatcctttatttattgttccataatgactaatccctcttgtgcatactagaatcgggggtggaacaactacacatttatctctctgactcagactgtatgccaaattgggctagaagctcacgtctgttcttttattcctgtggccattaatcaccagatctcagagtgaaccttcactgcttgctgacccattaaagccagaacagtcaagaacattgtaattggatccctttaaagtattttaagctgtgaatcttgggccttcagagagttttgctagccttgcttcatgggatgctttgcagatttctatcctgttaaggaagtgtattccaagggaagttctgtgggtgcttcctttggtctccaaggactctctttacatggtgtattgatttcttcaggcccaaccgaacatctttgtgtagtagagttgaaatcattttcacaacaacaagacttgaggccaagatgctgtcaaagctcagacaattctcacatataattgtagtgatgcttgcattatccatgcttcatgaccaacatggctgttaccacaccacaatgtttcattaaaactcatatttcatgagggactttccactttgaaaggcatccatttgtgtgtatcctttttgaaagaactatcaataaattttgttgagttgtgtacttgcacaactggattcctgctgaaggtgataacaactttgtagcttagttcctttgatgagacatgaaaaacattcatgaaatgttcctgggaatcttgaagagaaaaagcatttagtatggtgtttgactatacagcaagcactcatcaaatgggaccttttgttatagtctgacagctgatctgtattgaatcgactccataaagtgcttagagtctagagatctgctttgccaactgggtttccacattggtactaggacacaggaaatatgaactgtccttatcctacacctgcttgtttattaagcagaggggataaggctgtcactggagaagattcaggatagattttgtagaggcaattctctaagtttgaggaactcttcctgattggtagtgtaataaatatcaaggcaaggtctgaatggtactaatctttaagctttttttttttctctcaagaacctgtgtcagatcagtgcaagagatggagtatcacagtatatccccgtgtcatttactgaaactacttacgtaggttttctttgcagcgctgtgtctaatgacaggaggtgaattgtcgtgaccatggtggactgaaaaccactcctctagtttggagtgtactctctttatggtagatctccagtaattacatgggatgaacatattatgtggttgcctcttcaaacacaattcaagtttgcatgagtatctgcttttcacaatgaggcaagatatgaacattcccagactgcttctcatattagctttatatgatggcatagtatgttaattagatatgtgaaagatgactactggttataagtgtctacttcttaccttagcctgttataacctcagcctgaaagtattattgtctctatttcatatagcaaagacagaggctcaagtaacttttgcaaattgatattacaagtatgatttaaacagaattcttcgaggttcaactataccacttacctccctggagacctatcatttattaaaatgctagtttgtagtaatattgagattaattttactttattactggactactgagtctatttgactcccttgaacattatccagctaataatttaagagctattattaattaaggaaataaaatactttaaaataactagaggcgattaatttcattcagagtagtatggccacaaccaatacaataattttaaaatagcattttaccattttgatgaaattagaatatttatcatttgtatcataaaatactgaaacattttagttgacagaagaagatgggcaaatattttttaagttctgtttttttttttcttttagtgaataggttctttttcaaacaatgtattctgattatggtttccctttcccccatttctcccagttcctccccacttgctctcacatcctgctaaacactctttctgtttctgttagaaaacaaacaagtatctaaggaataacaatgaaataagataatgtagaacaaacaaacaaatcagactatgtcaaaacaaccaaacaagaaaaatagccatagacaaagcacaagaaatgcatatagatgcagactcacaatttaacactcagaaatcatggactttcactcctttaagctaatacacacacacacacacacacacacacacacacacacacacacacacacacagagtcacacgtgcttcaaagtattcactgtgggcagtcaagaatttgtatacatcttcatttgtttcctatcctgggaattattttcagatacatttaacaatatttaagcaatatatatctcattttgaagataattatttctattagaaagatttcaaataaagtgcaacatttgttaaattcaagatccattgtctggatggtttatatcacatagatttggccaatattaagaactgggatgtctgtatggtttttttttttcattcattatgtataccatgtctaaataaaaaccagtaacagtttcgtccatgaaatctcacccgcctttttctgttttactgaaacatattcacctagaaacatttgagtggcatttaattggatccaaggtggaacttggcaacaggcactacactaggagctatactccattgttctaaaagaaaggaaggaaggaaggaaggaaggaaggaaggaaggaaggaagaagaaagactacaataaacatctcctaacagcattctgttgtactcacaggtcagtgctcagctataaccatagaagttctctccgtatagatgagaacaaatacagatgtctccagccagacatgtgcatagagtgagagacctttgaacactactcctaaatgagacatctgcattgaatcccttctttcagggttcaggaacactgtgaagaggagatggaatgattattagagccagaggggatgaaggacaccaagaaagaaggcattctaaatgcatcaggattgatgcacatatgaacttacagagactgaggcagcatgcggagacactgctcaggtctgagcttgatggggtcccggcactgagaggggaagtgaacacaagcttccacccctgacccagaagttatctccacttgataaccattcacaaatgaataattcgttctttcctacagagtctcacccagggatacaaaccactcttaagggcagactccgtgcccaacagtagaaggctaacagagaacaaacacaatggcatctttggaggttgtttgtctcataatgttgttttgtcagggaatatttttattttaaattttactggtcccttgtgtatctattatggcttctggttttgtgttcttactggattcctatataaatgaatatgtatgtctctgagtctgtatgtgtttcttgtgctttttctttggttctttttcttgtttagttttgttttatataatcttatcttattttattattattctttcaatgcctgttcattttctaacagacagagtgtgggttcagatagggaggggaccttggaggagtttggggaggagaatttataatcagagcgaattgtaggaaaaagaaacattttccataaaagaaaaaatggtgtaaaaaacaaacaggccagtaagaaaaaaaaatctgttttctttgttgcatttccccattgagaacactgttattggtgtaattagtcttttgctgagtaatctgccattttctcatttggctacatttgagtttatacttttaatgtatttgatagccgatttccctatgattttgaacatgtagatattttattcatgtcattcatgcaatttgatatttcatgtggcttgttaatggtggcaggttctcagccatccatcgtctttgaagatttctccccactggccccctttcctgcactgacttgtgctgggagttttctgtctccccattgcttcacttctcatacattcccacagctcttttacttagcactgcaccttgagttattttcaaaactccatttgtatattctttgcctgtgctgatttggttgtgttgttctcattatccattgaattttaaaatatttgtttttaatcctattctttctatatttatttttgtggattcatattctttgattttcattctttttatcctttgttcacatttaaaatatattctaagctttatcagattccttgtttttcctaagattctgttgtaattttatggcatctgcctccctgttgattattttatggcatattttatacttttggatgtggaacttttttgtgtttcattgtcctactggttagaatttcacaggacagtaattaagcatgagtttttgagaaattttcttctgtcacgtacttcttagccttcaacttggattcttgttattcatgggaactgtaaattgaactttgagtctcagattatacaattttagtaatttaatttcttgtgagaatgttgacctttaatcacataaatccaagataacataaaagattggtactgtcttccttaacagtatgcagattttggatagctcagctgttaaaggctaggttcacaatcaaaacagtatgcagattttgctttgatttttaatttttgaggagtgtagccctttcagaattctggcattctgtagggatttacattctaatttctaacattgtttaaattaaatctctatggatacaaatttggactcaaaatttagagatctctactcccatttagagatctctactcccatacacacattcatactaatcctgctgaatgaagcatcaaccatatgtcacatttttagctgttgatacataagacttttatgtgaatgtgagttctggtttgttttgttgttgttattattggtttgcttgttttgtcagctggacacaagctagagttatttgggaagaggaaaccttagttgagaaaatgcctctatcagattttcctgtagtcaaataaccagtacccctctgtggtctctatttatttggttatctccaggtttctgcttcatttcctgtcctgactttcctcagtgatggactgtgatgtggagttgtaagtcgaataaacactttcctcctcaagttgcttttggtcctggtgtttaatacaagaatagatatgaggacaagtatgcatgtatatgagtgtatacatgtgtggcagccatgggatgatatcacatttcttccttagttgctttccacttctatttttgaaacagagactctcactggacaaatgtacacctaacagtgcatctgtttctaccagtctccatgctatggttatataagtgcaaccatgccttatgtctgcctgtctgtctgtctgtctgtctgtatctatctatctatctatctatctatctatctatctatctatctatctatctatctatctatctatcctatgtatctgtctatctattatctatctatctatctatctatctatctatctatctatctatctataatttgtctatcatctaaggctgagtgcttgcaatctgaactcaggtctccaggcttgtgaggtggtcactttacaaatcaagccatttcctcagctctggacttttacattttttaaactccttaatctagtacctataaatagttttgttttattccatccagaatttcttagcatttggatgagagtagttattcatcagcccagtcatccacattgatcaaattataattgtagcattttcaagataactgaattttgcatttttgtagcttaacagactgcatgatataagatttactatattattgatatttgtaattactatagtaatagaacaattggtataatgccaaatgaaccccagactactattgcacaaaagcgttttgagtctatccttttgcttatttccacacaatgttctttgattttgacacaggtttggttgacaagggaatgcaaagttcttggattgtttccttaggatctagacttctcagttacactctatgaattttggcaccaaagtgaagtccaataaagaaccagggtgatgaacaaacagaagccataaacatcagcatatacataagtgactatccctgtaatctatcacaacagatgttgcaggtcaatgatactaagcacacggccacagttttctttaattagtaatagtatgttacagttttataaaaataataattgaactgtatacaaggctttgaaactgttattaatatatgaattacagattatttatcctttataaaaacttcaaatttttatatatattgtcatatcaagaaaaaagttctctttccaataaacaatatacttacttatacttacaaaaatatacatttactaaaagcaaaataggaacacctaagtattcttagtctcctaagcctgagagtatttcattttgattaaaataatgttcatgcaaacaagaataatagcacagtagtagtatcaggcatctgagaaacatgattagttataaatgattttgttattaacagaagggaataaaaataaactacattctgttcagtaatctagaagaaggaaaaactgagctaaagaaaatagggattttgaacaagcaaaaataaccaataagattagtgtaaagagcaacaaggagcccattctagtagtataataatatacttatagtatgaatgagaaagagaaaataaatagaaatactaaatcaatttataaatagaataataaataaatgtagaaaccttggtaaaatagtttgtgttgaaaacattgtacagttataaaattctcagcaaatggttagaaatatatataagcaaatgaacatatttgatttatatattatcaagtgttccttattgagttcacttcatcttgaaccattttactggctagttcttcacactattcttaaactataaaacaattctggatattttcacaggaatattcaatttctagcatatatatttcccaatcagaaaagttaggaagaaatatagcctactgtctacattaacttaaaatatgatgtctaaaacagtcttcaactctggccaaatatgttgttttatactgagaagagtgctttctgagagccaagagatgttgactttctttatccaaaacacagatttcctctaaaggaaccccaagagtccttaaaagagaagccagtgacccgctatcttcagctagaggaacatggaagtaatggatgttttactgtagagatttcactaataatcacaggaaatcaaagaagtgtaagtgaaagataacagcatgttattttcacagcctctaagatccttccaaatagatgtggatgcccacagtgaggcacaatgacccaatgaaaggaatgaaatcatttcacattttcatggaaagctcaaagaacaatgatagtgacaagaaagcaatctttgttattaattagtgttggtcagaggttttatatctttaatattaacccatttgatttccataatagtgtgtaacacagttcttgtttctacaagtggaaacagatgggtacacacacacacacacacacacacacacacacacacacacacacacacacgccataaagtaggaagagactcctcacaaagaaggaagagaagaaagggaaatgtgaggtgaatgtgatcaaaatacatcatattaacatgtgcaaaatttaaaagaataaattaaaagccatactgaaaaaccagacactgaattaaaaatactggcacaaggtcaaggaacgagtagttggcaatgctgggattaaaattcaaggagtaaattcagaagctgaattttcaactactgtcttctggctccccttccacgaaatcaagcttttctctggaacactgaaagatttaaagagaaggtgaaggaaattacagaagaaggggaggatgagacagccagcacatacctgcagagaccattctctttagtattttttttttttttttgtttcactggaggatgactctaaactctagagctgtcctaataaggacaaaggggatttgactgtgggtgtgcttttcacaggatattgtatctgaatagatggcttagagtctatctatgtgcctgagccatgacttggtgtctcttacaggaaacttgctcatgttgcaagtgttggtatttaggcattttgctggtctacctttggagttctgagaagatacatcctcagctgctgccactaagagcaccacctgtgcctattcaatgtgttcccttttggaagggcgctgtccacctcacatcgccccctccttctctctgtctgtctgttccccacctctgcctctcttttctctctcctgtggctcccatccctggagagcaatctccccctccctttttacaatcccttttgaataacaataacaacaacaacaacaacaacaacaacaacaacaacaacaacaaaaacccttcacttgaactctttgcatgacatctttctctctcttttgagtcacttctttaaaattacaatagggataatggctggcaagctgggtcttgcctgtgttgttcttttatttaaattacatactggaaacaagagactcattaaaccacgtggagtttattggaggaagggaacagggtggggtgcgttaggtgttggccaactgggaacagagagagagaagagaggtggcaaagggggagagcaaacgtgtggaggtgctctcttaaaagggggagcttgcacatgcatactgagtccttatgcagcccggtaacacgtggtgtagccatggcatggccacaaaacacagggctctttgagcggcctaagtatctgcctgaatgcctattttcaggggatcaacataatgccaggttccaacagcctgcagtcagtctagttcatttctgccaagatggcgccttcattagaggatccttggatgggaggaaagttaaatctaggtgtgttggtcagaggaggtaatactataaaaagcacgtgaaatatcagaatcagatttctcttcttaggcccatgaaagaaaagaagcactgatgggagccaatgggaagtctagagttggccgagggctcagccaatgggttggggagttagagttgggtaggatgtgataagagacttttttggtgagttcaatgcattacctgaacagggttctcaaggcagttgggttaagatcaacgaggattaatttccacagatccaggccccgattctctggaaattgtgaacaatttgatattccaaagactaggaaagcacagagtgaaggttatataaggagagaatctgaaaagcaatctggaaaggctcagaaaaggaaaagaagtcaaagaggcagaggatgaaaggaaaaacaaaacaaaataagtagaaaaatcagtaaagtgttgtcagacaaagcagatagctttggaaaaccttgctaaaacaatcaaactgaaagtaataaccatataaggtcatatacagaaggttaaaaaagcccagtatatgcctatttgatttttaaaatgagtgtatatgtttaagtttataatatatcctgttggatttttttcctttagtaagcataaagtgttcctatcagttttgattggttttagtttgaaagctattttgtcagatattgatagcagataatagttcttgcctatgcctatattctgaaatgtttccctatgttcgttcatctagctgtctcagggtttacattaagggcattcatccattttcaatctataatttttaaaatttccttttgtttgtatgtgtatggatgttttccctgcaaatactcccaagcaccatgtgtatgcagtgctcaaagaggccaaaaaccagtgtcagagcccctgggactggagttccagatggttgtgagccgtcatgtggatgctgggaaacacgctacagtcctcgggaggatcagccagtgtacctagtcactgagcatctctcagatctaaaccccggggacccaattctgtttcaagcctgctgtggcttgggtttctgcagcctagatcatctctctatggctcttgaggtgcctagtgcccaggaagagctatggcagagcctagcatcgtggtgtggctggggaagcatttttgtttctttatagaaaaattccactcagatttatttctgtgttctttaacactttctcttaacagagtccattttttaaatcttagctttttttcccatttgatagcatagaaatgagatgagttgttttaaaataatacaaattaataacgaaggggcaattctgctgtctgaatgataactaaaagctagaaatggaagagaagtattagtaattcctggaaaattctttaaccttgataataattaaatgtataaataggaagacaattgcatgatttatcttctaatggagtaaaacactaaaattagtaaagctttatggaatagttaatttttacttttggtaaaatgtgtcaaaacttcccaaagttttggaaataaacaaacagccttttagatatagttgcagaatgaccagcaatccatgtctgaggatttcttccaaggaaataattgggcaataaatgttcagtataaacaaggacataccttaaaacttttagtttggtcatttagctgtaaaaaatagaacctaagatatttatgatctcataaaaataaaaaaatgtgtggaaggtttagtataatattaaccttgtaaaagtttggctgttcatacctaggtggcaggattttattagtttgtcaacaccgtgttttctaatttcttctatgattatgtgttttatataccatgagatgtagggttgtagttgtactctctcctacatgatatatttatgcttcttagtgatgcaccaacattccttactttgttatctcaatgccaatcaaattgcttaggacaaactcctgacattcaactgcaatgtaatggtagttgtatttgggaggaaaagattatatttattcatatttatattttcttgtatgtgttttctactcttttatacttcctgaagcaattatttctttttttaaatgaaaaataggtcagaaagtagaggaagaaaatgaagaaatgtttgtcctgtgaattgaattagatttgcagttcctctggtagttcgttagtctgcagctctctgtgactctagaaggttcttctgtgaggttacatcatttttctatgtgtgctttctattcctagagaaaatatatacattgactaaaacttaataagcagaggttacaaaaggtctgtctcacagtatcatccttccaaccattttcccacaccaaaggctgagctgtctcactgtggtttccactttatcaccttgatgctcaagcaattaaatgagcaaaagacatgaactgcttggaacagaataaggtttgaatgagctctgcatcgtgcatccactattttcttctgaggttttaatgttgcacatttatcttacctttttttccatttctgctttaaatcatttttattaatgacagaaatctaatatgctgacatattcattggtttgaattcttatataatttaattttttgagattaagcaccaatttctcaccctgacattgtaacagatgagttcttctaagatattcttctactaaaaaactatgtaacagaattgtgttttaaagaaactcttaaacttgcagaaatgatctgtcaagaaagtagtttccataagggcagagggttattaagtaaacacaaacaaatcacactatgaagcattattctgtagcagctgttccagaaatgctatggacacacttccactggagctaaaggttcaggagtctagcttggactcttagaggatgggcaatcacaccccagaagaccatgaacagctagcagtctaaggtgctaaaatggcaaccaaggagcttcttggagggacaattagaggaatcatggtgggaatacactggaaatatggatgggcttgtctaatcaatttgagagacacaaggtatctctgttatggaccaatactgccagaatgagaggaggagaagagaggagaggaggaaatggagtagcagaaatcttgagttgggggaagaatagaggaaagcaggatgagagataccatatcagagggagccttcatatgtctgaggagagatctggcactagggagatttccagagacctacaaggatgacagaaactgacaatctaggcaatggtggagaggatcgcctaaatgcccttcccctatgatgagactgatgactactttttatgccatcctagagccctcgtccagtggctgatggaagcagaggcagatacccacagatatacactgaactgaactctggaacctagttgcagagagggaggaatgaagatcaaaggggtcggtaccaggctggtgaaacccacagaatcagctggcctgtacaacatggatcccagactgctgtctgggaggccagcacgggactgatccggacccctgaacatggatatcaatgaggaggcctctgcactctagggggcccctggtagtggattagtattttttcctggtgtaagaagggactttgagagcccatccgatgcctcagcctgaacacatgggggagggcctaggcccagcccaggataatgtggtggactttggggagcccccatcgagggccctacccagcctggggagtggagggtggatggggtggggagcaggtgggagactgggggaagggttcggggggagggaagggaaagggagtgggagagggaggagcaaagagggaggggggattcacttgtgaagcaagcttgttcctaatttgaactaataaaaaaaattacaaaaaaaaaaagcctatgatggagaatgtacttctgtgtatgtttatcttattgattgttgaataaaatactgtttggccaaaggcagcaagttagacaggacaaggagtcaaagaggattctgggaaatgtagtagagaagtggtgatccaggccggaagtgacatagcgaggagactcatatttgagcaaggagaaataggaagggtacccttttctgcttcctgctccagcggttggatgtgatccaccagcaaggagggacgccaataaggcatccgataagataggtcttataaaatatataggtttatgatagttaagactcagctaacagatgagaaatcctagtcattggccaagcagcatttgaacttaatacaagtttctgtgtattcatttcggccctaacttgggcgggcagctggtgtaaagtgcacacatggtggtggggttcggcatcttttggtggaaagatttatcataacaaacctaagacagcagagcatggtggcacatgcctataagctcagcacatgtgcccagggtaatggtagcagctataggaatatctccagctggactgcatattgcattgcaagcaagtctggtgagatcctgtctcaaacacaaaactaaaataaatttagaaaacaccaattttaaatttgactgtcattttgctagtatcttaccattttttaaagtcatttatgcttattgttttaaaagctgcaaaatagagaaaaaaatgactgaagtgaaaattatattaaactagaaaacagaagtataactgttatttacaactgctgagcatcactcaagatatctctctgtgggtgtgttcagagacaaagtgggatgaccagagcaaaagcaggtgcataagatgcatggtattagtctatactcagtaatttttgtagtattgcttttttattctcttaatttaaaccaaaggaaaaaatgaaacactaatactttccagtttcaaattaacatttcatcagcaaaatattccacagatgctgaaagttaagaagaaaaagactaagtaaaaaagaagagtttaattccatgatttctgtctgtctgtctgtctgtctgtctgtctctctcctgccccgtgtgtgtgtgtatgtgtgtgtgtttgtctgagacaggtttctctatgttacagctctggctgtcttggaacttgctttgtagaccagggtggcctcgaactcacaaagatactcttgcctctgcttcccaaatgctgagattaaaggagtgtgcctccatgcccggtcatctgtgtatattttaatatttgaatttttggttcaaaacacctagactgttcttaaagttctgagttgaattggagaaaactgatttaacattaaccactgaaattgacaaattgactaatattgagagtaaaaagtgggagagctgagagatatgcccatcagcatgtgtcattactgctgtattccaatattactggggtccacatcatgtgtgacaattatcaagacttgtgttaaaatatcagagatgactttcactaatctaacaaagtgaaaagctaagcaataagaaacctacctccttctcttattccatttcagtgccttaagatttgttagcaatccaaacaagttctggtatcttccagcatagctctatgatactccccgacagatctagattctcaagtaactgatacccagccctacagtctaacagctcatatgccactagagaaataatactatctatatgagttgagtcttttcaagcaggggaattgaagaattgtctgctaatagtttctaatgttaacacttctacacccatatctttgtctatgtgtctgatcccccaagtgcttcagggtcagagcttgtggtatatgttaagtttttcctgtatattctcagcaggatgtatatgtttacccatgttggagcttcagtaacaaaaacactggtatccagtaatttacacctgcccctcactgaaacccttgcaactatctgatgctgatgttgtagttgttccaggagatgggatatcctcaatcattggttgaagcagaacacaaaggcccagccccacacctgattttgggaaattcttaggtttcacaacagtctggaagttgctgaaaactcgaataaaggccagctttacctttagcccagccttgttctcctcaattatcacaggcatatagtcctcaaatttcttctgcataaaatgtaggatggccttcataaggagagttaaaaagacaaaagacatgctatatatagtaagttttttggtgaagggacttttatttaacttaaggattgtcttttgtttccgttggtgtatttcaaatgtcaacttacaaaagaaaacaggttgtgttgacaacagatgggaattataatttatgatctctgctctggattttttttcaagtcaaccacagataaggactgttccatgaattttcagttaagtacctgtgtgtcttggtgatggtagaaccacaggaagtagtggggggcaattttgaattctgtgatgcacgcctttaatccctgtacttgggaggcagaggcaggtggatctctgtgagttcaagaccagcctggtctacaagagcttgttctaggacagcctccaaagccacagagaaaccctgtctcaaaaaaccaaaacacagttttgaactctgaattctctcaatgtggatcacagactttccctttagtgactggccaatctcttgtcctaagatttcattctcaccacttcatttagatgcttttttttttttttttttttttttttggtttttcgagacagggtttctctgtgtagctttggagcctatcctggcactagctctggagaccaggctggcctcaaacttacagagatccacctgcctctgcctcctgagtactggggttaaaggtgtgcgccaccaacacccggctagatgccttttctataatggtcattatcctatggtctggatgatatggtgataccatgtgatggggtgtgactgggggactgccatggtttcacatgaccatattacagctaagttggttgttcatatgtcctcctagctccatcctagcatagctttagccttatgttttctggaatctaccatgacaatactaaacatgtttctaaaagatactgtacttgtagctgaataaaaaatgcaacatatttccaagtatatacaacaacaaaaaggaagactatgtaacattgtgaggttgtattttacgtacaagttggtgaatgcatttctttctatcctatgaagccattgaatccgttctccattgggctgctgtcttcacccgccttcccatccttttcctagctcacagcatctcacctcatttgcctgggcattgatcattccattttggcaggctttatatcctatcatcatttcaacctatcctttcctgcttcttttataatttttccctttaagtttcaagactcttttcttctttcaataaaacccatttattttcatttttagaactattattttggctaacaactaaaaaaattagaactttaaaaaaatgctctcaatatttgttttgtcttctttttacctgataggaaatttaaaattcacccactgtaatatgaatcatatacaaagtacaggaaataattgctttaagaatagtttgggccacataaatatgccaaatattcaagaggttactttgctagtcctattctgactgttgtttgatcaaagagtggcttcaaattgctctgtcactccctgtgatgtgtatgtcactttccgccataagttgtcaaagccactacatcagccttttccctgccacatccagacatgtcttctcaaaaattccattctgtgtggtccccaattctgtttattgttgatatatgagggaatacatttatttcctaccaccttggtcttttgttaatcaggtctagtcagggatgcatgaatacagattaaaggatttctttgtgatatttctgtacagttgttcataatggagatttacaaaactcataggtttggcagaatatattcaaaaccactattctccttaacagtacatagggggtttcaaaagcctttaacaaagatgcaaatgaggctttgtatgtagctgtaggaagctacattttaaccaagctgtttcatatgtctaattaaaccctaattagaagctataattttgctgagctatgcaaagcttactatggttgtttaaaacccatgggtgttgagataataacaaagccatttcacttgggtgtggaaacacactatagaaagatttcctatgtgttgtggtaatctcaagccatgtttcataaaacaatctttctataaattattaaggctgtcactcttgctatagtttacatgccttcatgaaaatgcaaataaaattgatttcttgttgcaagagattaagggacagaaacaggacctttgagaggcgattgggttaatatattaattggactaatgggttactgggaaatggctttgttggaaacatgagctctctttggatagcttgctctatctatccttgtattgtcctgtgctattggtatgtgacagtctcctccactaagaaggctgtcacttaatattgtcacttgaccttggattcttggcctgttaccattttataatataacctggtctcatacccttgcctctttccatggtttaaaatggctgttgaccactaattgtcatcaagttatcacttattgtaagtgaccctaccaaagtgtcccagagttcattcctcttgcataaattatcactcttacatttgggctaaaaacaccgtgccacacaaccagtgatcctgtttctctgctggctttctgtgcatgctgttttacagttgtactgtccttcctgtctttcctgaaatgcagtcactagccatctttaagatagtatcatggctcaggttgagctctggcttgagatggggctgcatttcagtgtgccagtttgaattctatttctttgttctgtcatattgtatacattatagaattcctcacctcactaaaagcatattcttatattctacagagataaaaaataaaggcaatcatatgtttgtggtcatcaatgaagagaggaaagctgagtaaaatgagaattcttttatttatagttattatatggatagctctcagtactttatgcttctgtagacttttgcatagtatgaagcagtagtcatacaactatagtaaggacttgagaagtgtggtttcagaaagttttaattgaattatcttgtttataccttccatccaaatacagccagaaatgtgtgttagtgtgctaaaggctatttttcattcagaaaaggacaacatgcagcataagaatggtggggtggcttcttaacaaagaagggcttagaaggaacctagactgagatctgggcattgcttgggagtttgtctgagggtctaaatataggcttgcagttacattgagtgttattgaaattcagagagacttatgactgggtacatcagtcttgtctacaggaaggatagatgtcacaagagaaagggttgtaacagcatcagtcatgtagcttatctgggggatgggtgtgtttagtgtgtttaagcaaaattatgaaatgtttttttctcttgtgctctgagtgcctttatctggcactggtattctgtgaaattatgtcttgaaggaaatgtaacatggccagctgtgagggacagggcagcttcaaatgtctctgatgccttattgcaagtgtcagtcagtttctagctggcagggtctatttcttttctttcttctttttgttttcgttctttcctataagatggaagagtgaggtaacacatggaaagtctttctgtggtttgtgtctccctttgactcttctgcatagacatcacatagaaacaggtgactttactggcattcatgcagctgtcttcgcctctgttttcctatggatactcagcctccactaacccgagtgtttcttgatcaccattagagaagggtccaggccgaggggcttctgctcatggggtgttacttttgttgctaaaatttctctttcttgcttgtgtatctcaactatcaaacattatataaattttaagacacaagattcgaaagaaaaatataacaaacatcaacaaacctactattcaacttaaaagattgacaactcaaattacccacccacaataatccctcatcaggttgcctccactactcagaggaaatatttgaatttgatagttctttctcatacatttatttatggtttatacatatgtatgtgtatcagaaagcagtgtgccttgctgttttgaatgattttaaatttcataagaagagcttcatatatatgcttccatttccatcttttgttcaatgtttctgtgaagttcactggtgctaatgcatgtagctcttgttcataggtttttcttcttttctaccaattcctttttgcaaatatgttctagtttatcacttattttactctcctggacattaggattgttagaagtttattttgttgtttaaaaatgttgctatgattattttcatgcatatttcccattgtacaggtaggtgagagtatctaagttttaaatgtaggaatgaaaattctgagccacacagtatatgtgtctgcaactttaatttaaactaatcacatcaattccctcacccaccagcagcatgggaaagttcccagtctctactttatttcagtgcttgttattgctagatttaaaactttttgtgatgtgacaggtgaaatggtgtcattttacattttcattagatttttcctgttttctgtttcctttgtgctttctattggctgtgaagatataaaacttttcacatacatttgtcatttacctgatgtgggcgatatgagtagccagctcatataatttgcttgtttttatgttttcttgatgtcctgttgttggttgggaacactgtttacatgtgttgcacacatgttgttatttgttgtttgatggcttcaagtgtcttcttgtaatctgcaggttatctctctatgctttatgacattcttgatgaggaaacttataatagaaccattctgttctaattttgggtgctggttaatgagaaccctcataacaaagtggcttaaagcaataacagagttccatctgcttccatagattctagaaggtagggatttggggacagccacattggctgtttgtaactcagagtttctcatggaattgcaatgatgtattggagaatgaaacaaagagaaggcagctgggaatttctctctctatttacgtaaggacactaatatctttttaggggcttgtttcagtttcatcacaacatgatggtaaaggtagctagcctgcttgtctgacactcaaggctctggtgttttacagacagtgaggtagagactgtactgtcttgaatgtcctagctttggaattttagagtgtcactttgaaagtcttacaagctgacccatttttaaagatagggcacatagatcttatctcttaatggaaatgatattggggtcatgctccaggaagagtgtgcagagaacattatgtcatctttgaaaataaaatgtgtaacatatatttatcaatattttatataaatatattcttgattcagaagtactgagctaagagctaagtgcaaagatgtctccccatacatctctatacatttttgtttgctttacacatctctatcttcagtccatctggaattgatttctgtgcttaggtgaggaagtgatctgatttaatttcagtgattctaacacatgctattagttatctcttagtgatatgaaatgctagatatatgaaacaaaacattttgtattaacattttaattttgaatcttctttcctgttacactgacttttctttttatcgacagtggtagttttttaaaaaagtattcccacagtgttctacttattctatattgtagaatcaattccagagcctgttaaaaaactggaaaatttctttagaactcaactgaactttgggtttgtatagaattgtctttatgatgctcagtcaaccctgttcttcattaataggtatttctcatattatttcttatatatctcaaaaagtacatatttctgctcaaaaatcatttatatatataaattatttatcattagtttattaaaagtacttctttctttattctagtaagcttgcaaatatttgtgtaaattggtatcatagtcaagtcttgcctaaaatcagtctacaataagcctggggtgactatatagtttctagggaggttctagtaatgtgaagatttattttttgtttgtattacttatatatttatttgttttactttaaacacactcattttatgtcttcttaaaaatttaccaaatattttgatacttttatactatatttacaatttgtcaccccttcctctccactacaaccccccccccccggtgtattcctcacaccctttcaaatttatgacctcttattcttgaagtgtgtgtgtgtgtgtgtgtgtgtgtgtgtgtgtgtgtatctgttcccatcctatctcaggggcaaggatctttcatatgatcttgccaaggcaagacaatgagggggcgtctttgtcttgtttcttgttgctgaggctgcgtttgctagaaattgaattctcattactggcaattgtagactaaaggactcacatgtattatccttcataaaagcagtgagattaaaaacttagtaaagctatgggaattaaagttctcggagctctggaaactaacagaaaggtcacagcaaccagggaagagttagtgaggaagagtgatgtgtcttgttatggtcagatagctttgcagcattccaattgctcttgctttcactctttactcctagactatcagatgactgaaaagaatacgatctttcttatacacatatcagagcattgaaaacaatgtgacttgtacacataactggtacctctcaacaagatacccttggcctttgtgtcttttaaaagatatatttactccctattaattatctaatttattggcttcacttcatattatttccatgaccctttggctttctgtctactctttcttagtaaccactgagataacattagttcatcttttctattttgctttttagattttgagtgtttgattcttgtatttcaaactctcgctctctctctccctccctccctccctattgatttttgaagacaaggtttccctgtatagctttggagcctgtcctggaactcactctgtagaccaaactggcgtagaactcacaaagatcctcctgcctgtctctgcctcctgagtgctgggattaaaggcttgcaccatcactgcctggtgttgaaattctcttataagataaattaatatttaaaaccatctctagttcctgaattcttctacattattttttatcctgtaacctaattctattttcagtcactcaagatattaggtagaggtggtattcattgtgttcattcacaattctttacatttattttcatgctttctttttaatttaattttaaaattcttgaaagtttcttatttatctatagtatattgctatatctgtgtatttcttgtgtgtctggttcttgtggaggttagaagagggtgtcagatcccctggaactggaactatagatagttgtgagcttccatgtgggttctggaagagcagccattactcttatcttctgaggcatctctccagccctattaccttttcttattccatcctactgatccctttcttcacacctaaccccagttctactttaatatctttaaatttttatttatttgttttttggttgcagtttctgggtgtcaaggatggcccatgaccatgctacacctagaagacagcatcttataatacccatccccatattctggtttctgtacgttggctatccctcttctacagtgtctcctaggcctgggactgggtgttagagaggatctgtttagaaataaacatgcagcagttccttaaactcattacttgttgggttacgaatctctgatttgacttgcacactaccaaaagagactcctcttcttaaggctgagggcagcacccgtctttctacatatttagaaagtagtttaactacatgtccttttagtgaaacagtagtagactcctcaataggacctccatagccattggcttttcaccagttctacagtatcaggcatatattccttccatggatcaggcctcagtttcaatcaagaaacacttgccttgaacattcatgctactattgcaccattggacatatcttgtccgggttgccaatattacagcatgaaaaggtctttagttcggttagactcttggtaacttttctccccctgcattctgcacagaacttcatggcactaagaatgctggtaagcagggaagatgcttctagctaagttacagctagatttttctgtgtcctatatccgaatacatgtgatagggaaatgaaaggatattgggaaggcagaagagtctaaatgggaatgagtcaaaggaatattgggaatgtggggctggggatagtgtcagcaaaatctagggatatgtgaaaaatcccaaaagaagcctactactttataggtaaactaaaaagttgttttttgtaaataattttttaagtttttgagaattctgtacacaagtactgtatttacatcatttcagtcctccctctctctcctcctactctccccatgttccatcccaatcactaccaaattcatgacttctttatacacacacaaacacacataaaaatgtacatgtatacacatacatatatggacatgcatatgtgtatataaatgtagcctgctgaatccatttaatagtattcatatttgtgtgtatttgaaacaggaacctgagtagagttcccttgcatgagttaaagcattgcccccaggagcccgctgtcatgctttcaaacatctgatttccccctggcacattttccttttcttctcggaacaactgtttgttgtgtttgttttggagcaattctgtttaggctgaatgatttcagtttggggattccaaaaatatatatttgaaacatgctttgttcaacatagaattcttgattggtgggcattttgttttcaaaatatatccatgctattttagtatttggccccctgtagtttctgttgagcattcagctgttagcctcacagtagtacttatgagggtgatgtggccttaaactctactagtttttatgatctcacttcatgtctttggttttcagcaagtttactaagtaagatactctagctgttgtagttattccaatttatattacttagggctatcagaggctcccttatatttttattatttaaaaatgcatggatattatcacttagctattgttttattttgcattttccacacccttggaatgatgcacacacatttaatttgcatatgtataaatgcatagatttatctgtgcatatatgtgtatctttcactctactttgtgtcttttattttattttattacttcagtttgaatattttttaaaatatacatgttttgatatttactctttttctgagtgtgtgattacatgtacgtgtgtgtgtgtgaggtctgttcatgtgtgcgactatggtcatactcatgtcaggcacatgccgaggtcagaggtcagtcccaagtgtcaatccatatctcacctgacaccttgtctgagatagggtctctgctttctactgcatatacaaggctagctggtcacacacactaaggatacttctattgtcatttcccatctttctgtaggaatactgggattgcagatgtgtgctaccacatctggcttcttgtgggtgcttggtattaaaactcaggtccttgtgccttgtggcaagctctctactcagtgaatcatctccccagaccttaatgttaatattttctcttgactggttttatagctcacaaaaacaatctctgctttgtattatctgctataaacatattatcttattttcaatgcagtaattgccattccatttcattctacaaatttcagtggtatttgaaatgtttttcaccttctactttatttctctatttgtttacctttaagaaatccattaatctgttcaaaattcttatctgctggtgtctgcagcactgggatttgaaaccagggtgccatacatcccaagttctgcccagagacccacctccagcctcctccagcctcctgcagcctcctccagcctccagctgacttttcaggtgtagaaaaggctcatgagcagcatccagaatctggaaaaagctagaaatggctcctttcttagagaactcaggagttcagtccttgtccttagctttgctttagctccgtatcattctctacttgatttaaaagacttttactgctattgtcaccctctagtctctcctaccattcattaacccagacctagtacataaaccccctttccacaatcgttgatttttttctgtgacaaggtttctcttcgtagtcgtcctggatgtcctggaatttgctttgtagaccaagattgtcttgaacccatagaggttcacctgcttcttcctcctaaatgtggagattaaaagcatgtgccattgttcttagtcacatccattttatatttgcaactccttttatggtcctggtagactgtagaaattttaattgaataaccaacatcataaaggtttagaaagtttctctcttattttcttgccactatgaaaaagcaaatatttaggaattttctttttttttgaatatcaatagttgcctcttagcatggcaaattctgtatttacctctggtatttttaggtattgttagcagacagaggcagaatcagttaaattgcttagaactcagtttcctttaaaaatctgtgcatgtaaattgcaatagtgtctatataataggatagaaaatatccaataaatattataatggctctaaagatgatgattatggtgattatgataacttgttttttaaatatagctgaattaatcagttgtccctatttccataccaaatgcataaagtgtaagtatgtcactctattaaagggtgatatatgacactgggataggaattgcatttgtatggagagctttgcaatttgtctggcttttttggaaacacaaaaactgaagtttttattttacatgtgctcatttttgtatctctaccttcagaagaatctgttccaacctcttcttaatttgagactctaaagcgacaggaataatcggttgatttagaataatggaaaacacatttcagtgttaaaatttggtggaaatcgatttgtgatcttcaccttcagaccaaactccacactaagagggtattaaatcagagtcacagcatggactagtactaaataggcttttccagaacaggaaacctgaaggctcaggcattaatcagtggtgtttagggaaggactaatttctaagctcagagaagggcatagcttgaggttgccgagttcagagagcaaggaagcttatagaattccctgaaacaaaagtgcataactatttagtgttagtcatttctgaagatgaagcaaacccagaggataatggtgatggggttgcaagacttgaattccttagtcttggcaagcccccagtggtaatgacggcacagtagtaagtggatgtcgagaaggctgatactgtacagggctagaactctccacaatactcttgtctagtgtggccacttagcttgagcttttttctattacttgctagacaagtgatttaatgcagtcatgtaataatctcaggataaaggccatagttttatgttacagtctataaactgtaagatctaacactataaacgaaatatgttatatttctgtgctttcggtactttagtattgatttcatgtgtttcttacaaataattagtaagattggagaaatgtgggcaaatgaaattttatctttgctgatgtggtttgtatttttcttcctgttgttatttatatttgctgggtgatttggggctaatctttgtccctcacattgtgttcttttagtttcaagtaaaataactgagactttagaatattcattttgtgtatttttaaaaaatgatttattttgccccctccgactgcagtttcccctcctttctctccttctagtccctccctccacctcccctctgcacctctcatccacccctcctctatttttattcagaaaagggcaagtctcccatggatagcaactaaacatgccatatcaagttgctgtaagactaggtacctcccctcatattaagactgcataaggcaatccagtatgagaaatagggtcccaaaagccagcaaaagagtcagagacagtgcctgctcctactgttaggagttctacaagaatgccaaactacacaactgtgacacatatacagaaagcctatgtcagtcccacgcaggcttcctggttgtcatttcagtatttgtgagccctgcttagtagactctgtggggtttcttgtggtgtccttgacccctttggcttctacaatccttcctccccctcttctgcagtatttctagagctctgcctaatatttggttggggacatctagattttgtcctaatgatggtgtcctttgccttaccttttaggtttatgagggcacatctattcattgccaatcttagtatctgcactattggggttctgttcaggaagttgtctcctgttccaatgtgttcaagactatttcccactttctcttctatcaggttcagtgtatctgaatttatgttgcagtgttttatccacttgctttttgtgcagaatgacagatatgtacttatttgtatttttctacatgccaacatcaagtttcaccaacaacatttgttgaagatgctttctttttcacattgttgtaaattttgcttgctgaaaatcaggtgtctataggtgagtggatttatgactgggtcttcagtttcattccattgattcgattctaactgtctgtttttgtgccaataccatgcagtttttatcactatagctctgtattagatcttgaaatttgggatggtgatacctccagaagttctattactgtacagaattgttttagctgtcctgagattttttcatttttccatgtaaagttgagtattctttcaaagtttgtaaagaattctgttgggattttttattgggactgtattgttttgggtagcatgatcatttgactatgttaatcctaccaatccatgagcatgggaaatcttgctatcttctggtatgttctccaatttcctttttcaaagacttcaagttcttgttatacaggcctttcacttgcttgattagagttacattaagatgttttacattatttgtgactaatatgaagggtgttgcttccttgatttatttctctacaagtttattgtttgtatctgggagggttactgattttttaaaagttcattttgtatccagccacttcactagaggtgtttatcagctgtaggaattccctagtagaattcaggagtaacttatgtatgctataatatcttctatgactagcaacgctttgactttcttcttttccaatttgtatccctttaatcttctttagttgtcttgctgctttagctacaacttcaagtactatattgactagagatgaagagagtagacagtcttgtcttgttcttgattttagaggagttgctttgagtttctctccatttcatttgatgttggctatcttctagctgtatattgcctttattatgcttagatgtgtcacttgtatccccaatgcctccaagacttttatcatgaagggtgttggattttgtcgaagtccttttttttgcatctaatgagatgatattatggtttttatgtctctcagtttgtttatatggtgaattaaattttcatatgttgaaccaatcctccatctctggaatgaagcccacttgatcatagtggatgaactttttgacgtgttcttgaatttggttttcatgattttattgagtatttttgtatcaatgttcatgagggatgttggcttgtaattctctttctttgttgagtctttgtgttgtttgagtatcagggtgactgtggtctcataaaatgaatagagcaatgttccttctgtttctattttgtgaaataaatttgaagagtattagtattagttatttgaaaatctggtagaattctgtactaaaaccatctggcacttggcttttcttggttgggagacttttaatgactgcatctatctccttaggggttatgtgtctatttaaatcatttatctgcctttatatgtaacttggcaattttcttttggagcttttagtattcattctttattttgcatgtttagtatttgattattatgtggcaaggggatttttcttttctgttcaaatctatttggcattctgtaagcttcttgtaccttcataagtatgtccttcttttttctcaattttttaatttaaattaggaataagattgttttacatgtcaatcccagttccctctccctcccctcatcccctgcccccgactaacaccctacctatcccataccctttctattccccagggagggtgaggccttccatgtgggggtgtattcagagtctatcatatcctttgggatagggcctaggccctcccccatgtgtctaggataagggagtatccctctatgtggaatgggctcccaaagtccattcttatactattgataagtactgatctactacaagaggccccattgatttctgaggcctcctcactgacacccacattcagggggtctggatcagttccatgttggtttctcagctatcagtctggggaccaagtgctcccccttgttcaggtcagatgtttctgtgggtttcaccagcctggtcttgacccctttgctcatcacttctccgtctcagcaactggattacaattcagtgtttagctgtgggtatctacttcgacttccatcagctgctggatgaaggctctaggatggcatataagctagttgtcaatctcattatcaggggagggcatgcctgaaatttttcttctataattttattaaaaatatgttatgggcctttgagctgggaattttctccttatttggttcctattattcttaggtttgatcttttcatgttgtcacagattcccttgatgtttttttttgacttttttatttgaattacaaacaagattgaattacatgacaatcccagttcccttctccctcccttccacccctaacaccctccccaactaataccctacatatcacatttcctttcttctaatctacacctggatgattttatagttagcatttttgacctatatatctacttcttctatagtgtctttgacacctgagattctctgttctatctcttgtattttgttggtgatgtttatgtctgtatttctgagcacttacctacattttccatttccagaattccctcattagtggttttttattgcttctatttccattttcagtttttaattgttttgttcattttcatcaactgtttgattttcttgcctttcttgacattctttaaggtcattctttaatttatttatttcctccaattttttattgtctttttctcaatttctttaaataaaacaattgagactcagaatagttttttttttctttttggtttttagagacagggtttctctgtgtagctttggagcctatcctggcactcgctctggagaccaggctggcctcaaactcacagagatccatctgcctcctgagtgctaggattaaaggcgtgcaccaccaacgcccagctttctctctctctctctctctctctctcctctctctctctctctctctctctctctctcttctcctctctctctctctctgtgtgtgtgtgtgtgtgtgtgtgtgtgtgtgtgtgtgtgtgtgtgtgattttaaatttaattaggagatatttttgcttctgcatttgaaatccattgatatattgggcatggctggtcagctttcttggattttatcagaattcctctctacctctgtttgtctgtttcactggtccctctcctcctttctatcttcttcctttcatattcaaattctaatgtcctcaaaaagaaaatatcagaaaatatagatttatggaactgataggtcttgactccagaacaaagccatgctcttcacaatcattcacatgccatgcttaaaggtggtctgtcacagtgctcttgctataatggacataagcaggcataatcactgtgacagtgctcttagtcactctgtgaccactgagcaccaccatggaaaggttggatgaggccaatcccatccaatgtcaaagaagttgcatcattcaactagttggaaatatttcacaaatggaaggtgggaatcatatgaggccaaaaatacacgacacatcattcttatgttgcatattctttacatcaagtcctttgccaaatgtgtagaattcataaaggcttagctcaaattctaaatggagttgacatcaatactgtttatatcatttctaataatgtttgctctgtaaatatgtcttgactgcctagaagggcatttccctctaacatgcttgctggcgcatctgccgataattactttgaatggcatcttgctccctgcagttattggtcttgcatttggctggtgctttctatttcaaggaatctccagtaattgacttaaggcacatacaactcaaggactaatgggttctttgccaacagctgacctgtggcaagttacaatcttctcagattgtctgagtttggcttttccataatctgatgcaaattttatacccttgtcacatcttcacatccccatttagatactttttaattagtattagtcacagtaattactggcaattcacttttttcaattgatttctgttgcttataaagtgcctcattaagtactcctatagtttagtttcctaattctagatttggtataaacagcttgtgtgcaagagcagtatgcaatgaggatgctgttgatttctagttggttgttcatctctgggccacaatttagccattgattaatattcacaagttgcatatttttaatcttttatttttacaatatttaaaaccagcctttaattttatttatataaatacaatttatatattacatattaaacaaaagaataagggggaaaattgatgctaaaaagctctttcttccagaatattttcttttaaattttaaagatttatctactttatgtgcacaaatattttgtcttcatgtatgtctgtgtgtcacttgatgcctgtaaaggctagaagaggcatatgattctctgggactggagttacagatggttgtgagcttccatgttggtgccgggaaccaagcccaggtactgtggaagatcatccagtgcttataactgctgtgctatctctccagcccatccacaacaaatactaaaaataaaattaaacttctaactgggtcagtgcaaccgttctcttcaatgactaactagccataccttgttcctatttcattagcagttactggaactaaaaagaaagccaacttgtaaggccactgcttcaaaggaataatttttcttaaaagcaaagtaatgattaatttctttaataatttatacaaagttttattttaatgccaaacaaaattaggcaccaagacacattggtttctcttttaataaaaagtttacgggcagtatttatatgagctactggaaacatgttcatttttgctattctgaagtgtaagttgaaacaaatggttcagggtgtgttaggaacctattattgccactgtcttctgtgctgctcctgaagcttaactgctgatcagcacacagtattgtcacactatgtcacataggaagatgtggtccccctaataaaaagattggtgtcacgttaagtcctttgagatagaacaactattggcaaagctagtctcctattcttctcatgttttccactgtgtagtctacaacaatggctgcaacgctaattatataggtatttttatttttctaaatagatttttttggttatatagattttgtgactgcatgtgggagttgctataattctgaggcacagagaattttaaagaaagcatacatctcctaggttgtcactagataaaagtcattaacatttaaaaagatttatttatttatttatttatttattcattcatttatttatgtgtgtgtgtgtgtgttttcatacatattcagattccttcagaagcacccatgtgagaagtgccctcagaggacggagaaagaccccctcgatcagattcaaagatgtttttaatctgcctgatgtgggtgctggaaactgaatgtgggtcctcttgaagaccagttaagtactcttaacctctgggttgtcaccctagctcctacctttaacatttttttaggtggtttctcttctcttcccttctgctctttccttctctctccctccactttgtttttcatttttctttcaataatttgtatataaatgggtcatatgaagatattaataccactttgttattcaggataatcatatctttatagttccttggctataaaggtatgttaattcctggaaaccaggattagggtgttcacatatttggcagccagtttgctgctcaccacattgggcagactcttcctaacatttttaactcaacatattaatgactgtgatttgaaattttgtttgatgggacataatagttggatgatatatttggaaagattcttaaggagcaggtgagtgagtaagaaagtcactgttaggtgtgactttagcataaagaaaaagtccccaaattgttgtagacctagatgcttacacatggattcaactttcatgaaacagcaacatggggggggtctttgttgttgacttgaaatttatttactttcataatatcaatcttggttttgaacagatgtatcacaaaaatattaaagtaaataaaattgcaaaaatgtgtaattgtagtgggcctggttgtctcaatatcacatctaaacaagcaaatgtgcacttgacatcaaaaccaggttttctatttctgggtcctgccaaatttctcagtctctaacatagggccaatttcatgtttcattattttttttgcctaactggcatcccatttatatagaatcaagtcacacatatctttaatacacaggcctgcaatttcaataaaaatcttacattctcttttcctgaatgaactttgattttacatgttggatatttggaataattgttggagtcaccaactcactttgatatcgggaatgaaacctgcttatatatgatattttgtgcagcccaacactcaccagcttaccaaaatgagtagagagtaagagcattgcatttgattatttgtgcagaagggaaagctgcagatatctgccagctgagttaggtttacaaagaaaacaaaactttcaagtgacttttccacaataaagctcagaattcttgtctcctgcaaccctgcaactttccaccccagctcaggggggatgaattaccctgagttccagtgaaagtactcctttggcatagtatctggtgagctgatttctaccccagcatgtgtaaacaggtgctttacaaagaatgtgacagaaagcagtggactattgtccacagtgcaacttttcaagggttcctcttcaaccgaacataacactttggtacttgtattaaaagtgtgcacatggtacatgcaattgggaaaccttaaagctgactcccagtgacataggtcataccttcaaggccatgcctcctaatcctttccaaacagtcctaccaattgcagatcaagtatttaaacatatgagcctacaggggccattctcattaaaaccaccaaacttgatttcctttttcacttttcagggcttaccaatatgtgattctgaaactcaagtatatacgtacgtacattatataatacgatctgcatataagagagagctgaccatatgactcatctataccacttccaaggaaatactcaaaggaactgcattccactgcaaggatgctttcacatccatgtttgttgctgccgtgttttccatagttagggaatggaaccagtctagaagcttatcaagttgttcttaattcagctcactctcaaattcacctggggcagtttttgaaaagcagcttcatgcgaccctaccagagacctaatcagaatctccagggatgtaacaaaaggagtgaaatactcatcagtgtgtaaaaattactggaaaaagatagctgtgtctgcaacatgcctgatgataggttatttcgttttgtttttgcccatctgtgatgggaattcaatagctccagatatagattgctccacagttggtacatactattatcttttgggacgtagtcttactcttttctaagtatatgtattgcacagtccaaaaagtgttaaaactacatttccaaaatttccttgtaactaagaacctaggtatgagagaaagcccaccaacaatatgtgttttcatcagttttaaaagactatttaagaaggcagcctactgcctgtggttcctggttgtcactgttagccaggtggatgggaagtgatctttcagtgatagattccacagttaatttttcagtgtcatggatgtgcttaggtgtggacatagcagtggcttattaactctaatcttggggttactgatttgaatatttgctctccagactggtggtattcgtagacttctgagtagtgactgggtggctgtggtgccaggctaatatagtgatgggctttggactgtaccttcctcagtggggtctgttcactagtgttctggagacacctaagaaagcagcttagagccttctctttcattatccccaccaaccttgtgactgcaatacttaattcctactactagctctcttttgataactttcatttaacaaagaaactaagatctcaggaagggaataacttgtgcataaacacatagttacctatagccatgcctctttgaactgacctgattttatcagaaacacacaattcactgccagtggtgtggtggagaccaagtcccaggcgtagtaattaccaactgaatttttgatgtgagcatgtttccaatggaggtataattcatgtaagatgtcttgaaaaatttatgaatggcatgtgtgaatgtgagtttgtgcatagacctgttacaggaaactaggataaagtgcatttggtttttatcaaggcatgcttctgtctaataccttggtatgttatctattagtgggttcagcctccagcacacacacacacacacacacacacacacacacacacacacctgctgttatccttaatataaaaactatatgtttgtgaaacaattatgctaattaaaagctttttttctgaagtttttaaagtaatttttagcatataaaataatgggtttgttatattttcatacatattattttactgtttcatacatattaagatattattgcatctgaatcatatttctaacactctcactcctatttcctgaccttaatcccactgatcctttccttccatatggatgtgtaggtacatacatatgacatgaaatacataacatacatattaaaatttacatttcccatatgacagaagttgtgtagtattttctctttctttgtcattactctcttgctcctatttgtcttccctctagatcctcttctctctcctcacagtccccattttactttcatgtcacaaaaccacacatactcatgtgcatttagaattcaatctagaactacataatgagaaaacctttataagtctgactaattttagtaaacatgatgatctccatatctactcatttttctataaatacaataaattcattttctttatggatgctaaaactccactgttttatatattttctttggcctgcatctgttgatgggtatctaggatagttccatattttggctattgcaaatagttcagcagcaaacatgtgtgtgcaagtttttctgttttatgctccaacatatggtatactcagtagtgatagagttggatagtatgggaattctacttttaagtttttgaggaaatgcctaactgactctataatggctgtaccaattttcattcctaccactgtctctacttttctttcaactttttttatttgaattagaaacaggattgttttacatgacaatcccggttcccttctccctcctgttctcccctaccaccccccacacacactaaaaccctatctatcacatatcctttctgctccccctagatggtgaggccttccatagggtgtcatcagagtctattgtgtcctttaggatagggcctaggccaacccccgtgtgtcttggctcagggagtattcctctatatggaatgggctcccaaagtccacacttatgctaggtataagtactgaacttcttcaggaggtcccgtagatttctgaggtttcctcactgaaacccatgtggctggggtctggatcagtcccatgctggtatcccagctatcagtctggggagtaagagttcccgatgttcaggtcagctgtttctgtgggtttcaccagcctggtctggaccactttgctcttcactcgtacttctctgcatctggattccagttcagttcagtgatcagttgtgggtgtctgcttctactttcaccagctgctggatgaaggctataggatggcatataagtcagtcatcaatctcataatcaggggagggcatttaaggcagcctctcctctgtggcttagttggtgtcatctttgtagatctccagacctttccctagtgtctgatttctctgtaaacctaaaatgtctccttctattatggtgtctcctttcttgttttcttctattctccccccgactcaacctttctgctccctcatgtcttctgcctccctcctcttctccccttctcattctctagctcccttctccaccttcctgtgctcccaatttgctcaggagatcatgatcctttccccttctccaggggaccatctatgtctctcttagggtcttccttgtttattagcttcttaggcagtgtggattgtaggctggtaatcctttactctatgtctaaaatctgcaaatgagttaatacataccatgtttgtctttttgcgattgggttacctcacccagaatggtttcttctagatccatccattttcctgcaaatttcaagattccattttttttccactgagtagtactccattgtgtaaatgtacaacattttctctatctattcttcggttgaggggcatctaggctgcttccagtttctggctattacaaatagtggtgctatgaacattttgacaattctgacaggagtaagatggaaatcagccatctgtcagctgtggggttggtgaatatcttttccagtctgtgggctgatgttttgtcttgctgactgtgtcctttgccttaagaagcttctcggtttcaagaggtcccatttatcaattgttgacctcagtgtctgtgctactggtgtactattcagggatcagtctcctgtaacaattaattcaagggtatttcccactttgtgttctaataggttcagtgtagctggatttatgttgaggtctttgatcgattttgacttaagttttgtgcaaggcaataggcttggatctaactgcagtcttctacatatctgcaacctgttatgccagcatcatttgttgaagatgttctctttgttccattgtataaatttggattgtttatcaaaaatcaggtgttcataggtgtgtgggttaatatcagggttttcaattctattccattggtctacctgtctatttttgtgccagtaccaagctgttttcaggactatagctctgtaatagagcttgaagtcaggaatgtgatgcctcccgaagttactctttgtacagggttgttttggttatcctgggtcttttgtttctccatataaagttgagaattgttatttcaaggtctgtgaagaattgtcttagggttttgatagggattgcatccaatctgtagattgcttttggcaagattgccatttttactatgttgatcctacctatccaagagcatgggagatccttccattttctggcgtcttctttaatttctttctttagagactcaaaattcttatggtacaggtctttcacgtttttttggttagtgttaccccaaggtagtttatgttgtttgtggcaattttaaagggtgatgtttctctggtttctttctccactaatgtgtcatcagtgtatagtagggctacaggtttttttgagctaatcttgtatcctgccactttgctgaaggtgtttatcagctgtaggagttccctagtagagtttttcgggtcactaatgtaaactatcatatcatctgcaaatagtgagagtttgacttcttccttcatttgcattcccttgatctccttttgttgtcttattgctctagctagaacttcaaggacaatattgaagagatatggagcgagtggacagccttgtcttgtccccgattttagaagaattgaattgagtttctctccatttaatttgatgttggctgttggcttgctgcatattgcttttattatgttgaggtatgttcctgttatccctgatttctccaagacctttatcatgaaggggtgttggattttggcaaaggctttttctgtatctagtgagatgatcatgtgtttttttttcctcagtctgtttatatggtggatcacattgatggatttatgtatgttgaaccatccttccatccctgggatgaggcctacttgatcatggtggatgatttctctgatgtgttcttggatttgatttgccagtattttattgagaatttttgcatccatgttcatgagggatattggtctgtagttctctttcttagttgtgcctttgtgtggcttagctatcaaggttattgtagcctcgtaaaaagagtttgtcaatgtcccttctgcttctattgtgtggaacaatttgagtagtattggtattagctcttctttgaattttggaagaattctccagtaaatccatctgtccagggctgttgggagacttttgatgactgcttctgtttccttagaggttataggtctgtttaagttgcttatctcttcttgattcaattttggtaagtgatatctgtccagaaaattgtccatttcctttaaattttcaaattttgttgagaacaggttttcaaagtatgacctgaagattctctggatttcctcagtgtccattgttatgtccccttttcatttctgattttgttaatttgcatgttctctctctgccttttggttagtttggataacggtttgtctatcttgttgattttcttgaagaaccaactctttgttatattgattctttaaattgctttctttgttttgactttattgatttctgccctcagtttgattatttcctggcgtctgctcctccagggtgaatttgcttccatttgttctagagttttcagctgtgatgtcaactctctggtgtggctattctctagtttcttcatgtgagcacttagagctatgaactttcctcttagtactgctttcaaaatgtcccataagtttggctatgttgtgtctacattttcattaaattctaggaagtctttaaatttctttctttatttcttccttgagccaggaatggtgcaattgcgtgttgttcaatttccttgagttggtaggttttctgcactttgttttgtttttgatttctaactttaaagcatggtggtctgataagacacaggtgatcattccaattttttgtacctgttgaggttttctatgttgcggagaatgtggtcaatttttgagaaggttccatgtgatactgaaaaaaaggtatattcttttgtgtttggatagaaagttctatagatgtctgttaatcccaaatgggtcataacttctgttagttcctttgtctctttgttaagtttctgtttggtggtcctgtccagtgatgagattggggtgttgaagtctcccattataactgtgtgaggttttatttgtgatttgagttttaataatgtttcttttacaaatgttggtacctttgtattttggggcatagatgtttagaattgagacttcttcctgatggatttttcctgtgacgaatgtgaaatgaccttcttcatctcttttgattgatttgaagtctatcttgttagatactaggatagctaccccagctcgtttcttgtgtccatttgactgaaatatcttatcccaaccctttactctgaggtaatgtctgtctttgaattcgaggtgtgtttcttgtatgcagcagaaggatgaattctgtcttcgtatccattttgttagcctgtgtctttttataggcaagttaagaccattaatattgagggaaattaaggtccattgagtgtttattcttgtttggttttgatttgttgctggtactggtatgtgtatttaccctgccttttattttgtgtttttatagagggggattatctattgcctatgtttatgtgagtgtttactatgcattaaaacattggatgaacacgtattactatggatgccaaatagtgtagtgtagaatcagagttctctttctacagcagctaacctcatggaagatatttgtctcaagagtttggtctacatgcatcccgtaggttcatgctaccaaattctgaagttattttcagataatgatatcatatcctagatttaagcagacttttctgtcctaccagctgatggggtatgtactgtgtatgtttatcttattgattgttaaataaaatactgtttggccaatgagacagcaagttagacaggactaggagtcaaagaggattttgggaaatgtagtagagaagtggtgatccaggcaggaagtgacatagcaaggagactcatatttaaagaaggagaaacaggaaatgtccccccttttcccctggctcctccagcagcacaatgtgatccaccggcaaggagggacaccaacaaggcgtcctataagataagttttataaaaaaatatagatttatgataattaagactgagctaacagatgagaatcctagtcattggccaagcagctttgaacctaatacaagtttctgtgtattcatttgggcctaactcgggcgggagtctggcataaagcacacatgtggcagtggggcttggcagcttttggcggaaagatttattgtaacgaccagccatttcccaagtaacaatacagagacttattactaattataaatgcccagccaatagttcaggcttgttcctagatacctcttataagccaaattaacccatacttcttatctacactctgccacatggctcagtagcttttctcagtacagcaagtttacttccttctctctctatcttcttgtgattctgagactcctccccattcctctttgtgctctctgttcatctgcaagtcctgcctgacctctagctgttaagctattggccagtcagcttctttattaacacaaaacagtgacatatattcacaaagtgtaaaggaatattccacacctagctcaagaggaaaggatacctccatttgggtgtcactgctttagataaccttcttctaggcatttttcagcctgtcactattgagctgtctccagtggctgcctctcatataggtctatggtgtgttgatctcaggtgccctgcctgattgttcttccttgtgtgtatgctcttggtgttaggtacctggttagacactaacaagtttaaggagattagggctggataactactttgtagtgaatagcatgaaaaaccaagaactagaactgtagaattctattgactgatccaaagtaggacccaactcatatctctgcccatggaaggatatgtgacatcttgacctgacattgtcacctgactatctaaacatggttcctaaaccttataaaattactatttagaagaaggttttctttcctttttttttggaaatttttaaattcaaattagaaacaatcttgttttatgtatcaatcccagttccctctccctctcatcctcccatgctccccaccaaccccccattccaccctcaatccactccccagggagggtgaggcctttcatgggggatcatcaaagtctgtcatatcatttggagcagggtctagaccctcccccatgtatctaggctaagagagtatccctccgtgtggattaggctcccaaagtacattcatgtactaaggataaatactgatccactaccagaggcaccatagattaaccaggctgccaaactgacatccttgttcagggggtctagttcagtcgtaagctggtttcccggctgtcagtctggggaccatgagctcccccttgttcaggtcagctgtttctgtgggttttctcaacctggtctagaccccttactcatcattcctccctctctacaactggattccaggatttcagctcagtgcttagctgtgggcctctgcttccacttcatcagctactggataaaggctctagcatggcatataaggtagtcatcaatctcaatataggggaagggcatttaaggtagcctctccattattgcttagaatgttagttgggttaatccttgtagatctctgttcatttccctagtgctagatttatctttaaacctatgactgctccctctattatggtatctcttttcttattttcctttattcctcccacccaatcttcttgctcctttatgttctttccccatcctcttctccccttctttatctcctaactccctctcctctcccctcatgctcccagtttgctcagcagatcttgtccctttcccattagaagaaggttttctaataaagaacacaaacacaccattgccccttctgtaaaagttgatagaaatggtcccttcagttaccaggacaaaaacaaaacaaaacaaagaacctcaaacaagtcctttattaggaaagctcttccacgggccttcaaaatatgcaaagcctgctaaaatgtaaatttaattgctacagtggtctctatggtctttgtacactttctcttgtgagtgtgttcagctttgcaatggtctagtttaccatagccaacttttaccccttgcatatgccctgcttcagtttgtaattcatggcattttgtttagtctaaattatttgagaaataataggaagccagagtagggtgctggtgatgccagggtggctaatttttaaccaataagttcttccttaagatggttcctggacacagccctctaagctacagtgaattcctctccactgcttacctgtcccaccagggaggtgccatcttgccaaaacctgcaggtggctttgggacttgtgatagctaaatcttttgttctgtagatgcaattgcaaatcacttttcatcagagccaaatggctcacctttctctcttctcaacagggagctatctggctggagttcttgtatctactttattaccaccccttgacctgtcactgtttttcaaggcacaattgacaataaaaaataatcttccccattgccccaatcgattgcactaacaaatattattacatctctataattaaatatggggcacaagggacacttaattcaaaaagagtgggtagacatgtaggtaagaagaaatacataccctaaggcagaagaagagtatgaattaatgtgtaagaaagaaaatacacaaagtgtcatcacaaaatggttccatgaatagtatttatagttgatttgtttaatccatttttattgagtttctcttatgtgcaagtcagccaatgcagaaatcaggtttccaggcattatctagcatgtcttttaatgggagccataaagaaaatctgactgactgggtaaaactattcttagatgaatccaggatggtccacattgatcagaatgcactttctgaagcactcacagtctttttactttttcagtataaactctagcttgagatcatcaacaaaatatcagtggataattggtgaacattttccttttgcaaaagtcagataactctttgatctctgtcttctgtgattttcaaatcttctgtgattattaaagtttccttagtgtgaatcaataatctaattttcaagctttctcattaccttaatttgtagttaagtaattcataaaacacacatttattgaggattctgtgttctggtaggctctgaagtgtcaatggtgaacagaatatagtgcttgtcctcataggttagaccctcttactgaagagcaattaattacaattaatcatgatgttaccaggtagcacataggattgtagatgttcatggcagatggaagcgctcccagaagtggtgacagtgtcattgtataggccagcccccaggaggtgtgactaggtttgtaatatccttcccaattattttagacttcaaagtcctcattacagcccagttctgcctttttacttgggccgtgatgtttcaaagaagccaagtaatcactaagctttgctgtttctcaccatctaattctgccctgtcttagtagtctatgaaatgctcatcagtttctctgatgcagtttaactctttccctctttcttttttgttgccttaagcaattgtttttatttccccatctctgaagcaattccttttcttagttctcttcttgtgaaatactagatttgttgcttttttcttgtttctttaccttttaatttcttacacacaaaccagaaaaaaaaaacattattacaaaaagttattgtggaaagcagttaaaaatacacattaaaagaatattgaaaacacttgtcttctcattacatatatttgcctatatcttcatgtacatttacacacagagaatcaagtagatttttttgtccatatgtggtgcttagaatcaaactcaggaattgcacacagtaaacatgtggtctactattgagccacacttccaggccagtgtgcttttgttacctgtggttctcactcaccttatgtcatggtcatctatcagcttgatttgaatggttaaattagtctttcattgctagaacttgaaaatagccttcagaggaacagccttgtaactaaatctttgaataaagttataaaacattatgaaaattctagaaataatagttattgaaaatgtattttactagctgagacaactctttaaaagtggttcctccaagttgttgccaatcaataagttctagaggaggggaattcagttttttcagggataaaggccatgaggggctaacccatgctccagtaactagtcctaaacttatgcttataaagactaagtggattttatgggttttaataaacaaagcatatgaagttgtgaggaaaaagcagtggatggataggggtggaggagtagttttagaacaagttaatggggtagattttatcaaaacctatatgtatccattatgttctcaaacaataaaaaaggacaaattgctccttcattgagtgtgtataggaaggccagaggtcgaagtggggtgttttcactgttaactcactttacaccttattgtttgagacactctctctcacttactgaatctagaacttactgatttgacaagactctctgaccagcaagctccagaaatctttgtatctctgttccccagtgctgtgactccaggcatgtgcctccatggccaacctttttctcttcttaacccaggtgttggtgatctgaatctgatacatatgcatacatatccttaccctaaggatttcagaggagtgggtgggataatccttagtaacagttaacttagaaagtctatgataattaatatatgtacttagaaatataaagcaattttatttcaaaagagtacctttcagaagcatagtgaacctgtctcatttctacttcctctgttattgtggactgagcaaaggcatggtagaggaagcctagatgaaagtttgttatggtcaccactgatgaatttctgttccctaggaactcacaaaaggatgctgacagactgaaataattctttaaaataatcttcggaaccacattcaagtgcaaggcaatgcatgctagagcatttgtgcaaaataaattggccttgatgggggaggggggaaaggacacaagtttcctgggaagggaaggagagtggtcttggaagaggtggggaggaggttgaatatgatcacagcacaccgtatgagattctcaaagaactgatcaaatttttaaaatgacctttgtacgtgtttttgagattaaagatgctttgagttctgtataagatctatatgtgaattagctttgactttttaatcatgttgttcacagtttctttctcttcttccctatctccatctgcagctaaactgtttgttttttgttgttattgtttttgaattgaattggtgatagtgggatttatacagataccattacaagtgcacctgccagggtctagtttgaagggatgggatatgcaacctccctgtggaaatgccccctgccatgagttcttttctgtgttagggtagggtgtgcctctatgtcacagagacctgtactaaaatatagatttgctatttactaaaatggcaaactacttaatctccctgaacccactgctttcctccaatagtgtgagacgtggagaatatccattcccttgtaacactgttggaagaatgaaaatgaatgacaacaaaaggcctgtctctaaggcgttcttcctgttctgacagaatggctcagaagacagaagcatagatggatattgagagatagatgtgttttaacttcatgacatttttttttttttctggaaaattttcttgtcctttaagatcaacctgcaaaacactggatttttcccttttacactgtcatgtcaattgtaaaactttcacagtttcctccagtgacatggattggaagtcatcataaatgtggggaaaagccgtgttactgagataatgattttgagatttttcaaagaatcaaatggccatgaaagatgcagtgagagacacaaagctgctgcagctgctgccaggtgcattcctttcatgctacccaggctgactgaaatattggctttgactggtgaatgggtttggattttaggtctagataaaattgcagagagacaataattaagcagtggaaactgagtgtctaaagagctaatccaaatataggaattacagggatataatgtggaatgacttattactactggtttttgagaaggtgtggataccagtatgcagagtgtatctccacagagtaggagtctgttttgcagggcctgaatggctgctaaattcagcctctctgctcagtatacagcctcattgtggatagtttaactgtctgcactgtgtttcctttgcttctaaaacagggttgctgataaatctggactctgaacggtttgggaaatacaaatgactcaatgcatggaaatggttagctcatagaaaggtctcaaactgtcattattatgaaggtgtaagcctagactaatgccagagacttggtttctaactccagccttgacagactggcatttggatgcttatgtaatatgtttttccttctgagccacatttccttgatagaaaaatgcaaggagcaagatagcacagaaaatatctttcagtttcagatgtgaacctataatgcaagacatgcttttattctttttaacacagaattatctagaaaaatgtaaattttatagtatcaaatttaattctcttaaaaatatgtttatcccactgtcttgtttgtttcttcttgtccttattatgaatatgtgatatgatctgtccttctgtatgctatgaatgtgttacttttattgtttgataaataaagctgttttgaggaaacaaatttgtgtgtgttcatgcatatacatgtatatgtgtggtatatgtattcacttgtatgtgtctgtgtatgtgtgaagttagtccctcacttatttcccaccttcctttttgagtcagggtctcttgatgagcttgaagctcaattgttcaggtaggctggctgggctacaggccctgggatttgcctgtctgccactggattccaaatacataccagttgacctagcatttatattagtgctagagatggaagttagattgccagacttcttttactagtttttattgaccaagccatctctccaatttccaatttataataattcttttttcacagaacatagttctgtgaaccttgtaaaatgtgaatgatatagaaagaaaagaatagacaaacacaaaacattgcactaactctgagcaacagattctcattaaatatttaagcgattaaattaaaaaaaatgtagggactttgattaaaaaatgtgctgattgtgttaaacatgatgtttatgaattagactgtgatcctgtggtctgttctgacagaacccaaaggcacagttatgagagaaagtgtgtttgtgtacacagttatgtctgtctgtctatctgtccacacacatttttctttaggatcattttttctgtttcatatgaaaatgacaaacttaataatgtaattattctgtctgtgcatgaccagctatgtaaattccaaatcataaaagcttaatgcttgttatatggcttgtggattaatatgaagaaaattaatacaagtctatattcttttttcttcatagagacttacaaaatgtattcttgccttatataatgtgacatttatttccttgtgctcgctttgacatcacatatactaaaattgaaacaatacagagaagattattgtggtcccagtgcaaggatgacatgcaaatttgtgaagtattccataaatttttcaagtgggaagggaagagagggataaaggagggaatatggggagagatagataaaattaatggccaattgagggatagtatggaaacctaatacagtagaataggcgagacagagcctcaagaagccatctcttgtcactaaatgaagcttccagtactaggactggctacatctaattgagttgttggccaatggcctcacatgagaattcataagaaagcttggctgttgggcaagactgtaggttgctctcagcaaagtggccactaggttccatttacagaactcattacccatcaacacaactcattaaacaccgggaagtcaaccaggtgcccacgtaatgcctttacctctatgttataggtctttggtacaggaaggtaccttacatgcttccaaaagagaaatgtaaacaccaacccagtcacaaaccctttgatgtagaatttgtttactgcctgtaaaatatgctagtgcaatagcagcataaagcttgtgggagtagccagccaatatctgatttgatttaaggcccagttcacaagatggaacccatacctacattgaccattaccaaggattacaaagtggagtcagagataggttgataactggtagtttattgggggaaaatactcatgcaagggaaccagtaaccaggtttgcacccgagcaggacagactcagtaatgcctcccagccagctcagccaagtgagagagccgcatgcatgcctccctccttcttaaatccttgctatgtaactgtgaccatgccaaagcggccttttcagagctaagagcaccaacccattgaaaccctgaaaatgtgtgtatagtatgatgcacatattttaaatttccaaatgctggaaagtgaaagacatccatctgcccaacctcatttctccgaatgcccttaggattacagcctgctggcaatagagcttgattatagaatgaacaggtaagacagtttctcactatctccttggcttgttgcccagcgatggggaaatcctttttgaaacatttgctatttacatggtgtttcttatgaaattctgaggcttctagcatactttattaataaacaatcaatatcatcattgccttatgctagtgggcctggcagacccatatgggatctgatatgtgttatatatatcggataggtactgttaatgattgtttcttataattgtataaacactgaagttaattctgtattgtcaggaatgaattcagcagtctcgatgtgtaaaactctgcatattgagaatcactatattgagaggctctgtaaaatctgtaagtaccataagtactgtgtataattctgccttctgtacagttatatggactttgaactactttacttatctctcctgagttatatcctgccttacctgatttttttgcatcagtgtagaaggtagggactccagaaataggtgtttttcttacaataattggaaggatccagattgtcttttttatgaatttatttctgtcagttttgagataattgttaatagttcccaaaaagttagtacaagctgtctgccagtattcatttcttccataaggaagaaatttcctcattagttaaaggtactataatttctgctgggtcccttccagtcagttgacaaagtcttaatttgccttttagaatcaaatcagaaatcttttctatgtactttagctgtttatgtggtagaaatatccattctaatataatatcttccctctgcatcagaatccctgaagggtattccctggatggtaaaataagaagaatacagtctaattcaggatccacgtggtctacatgtgcatccagtattctgttttccacccattgtaaatctttttcctcttcagctgataatattcgtgggctgtttaagtccttgtcccctttgagggccattttttcactttttttatttgagttacaaacaagattgaattacatgacaatcccagttcccttctccctcccttcctcccctaccaacccccccaactaaaaccctacctattatatatcctttcttctaatctacacctgactcaacctttctgctccctcatgacctctgcattcttccttttcttcccttctcattctcgtagctccctcaagggccatttttaaaatgatttatgtcatgtccttctactccaattattgtttgtagttgagaaatttcccctagtaatttctgcaggtcattaagagtttgataacaatctcttctaatttgtactttttgcggtctgattttttgtaagtctattttataacctaaataattaatagaatctcctctttgtatcttttctggggcaatctgtaatccccaatgaggtagaaccccctttactgtctcaaaatccattctaatgtttccttcttagaatctgacaacagtatgtcatccatgtaatgatatattatggatcttgaaaattttttttacaaattatctccgaaggtttttgtatgaagtgctgacacaaggtaggactatttaacattccctgtggcaaaaccttccactgaaatctcttaactggctgtgaattattataagtaggtaccatgaacgcaaatttttccctgtctttttcttgtaatatatactgaagaaacactcttttagatcaatgacaatgattgaccattctttaggaatcaaggaaggcaaagacattccagattgtagagagaccattgtctaaattactttattgattgctctcaggtctgtcagcatcctccatttactggacttctttttgaaaacaaatacagaattccaagggctgatagatgcatctatgtgcccagcatgcagctgttcctgaaccaactattctaaaacctctagcttctcagaggttataggccattgtcctatccagacaggttcatctgtaagccattttaaaggtagagcttttggttcccctgtaggtttatcatttgtactttgtttatatacagcctcgatggttggtatctgttttccatagagccttactatattttgtctaccacctagagattgtatatgatttacatctcatactagaggaatgtaaatctatgtattccattggtgtaaatggtcatgactccaaagatttatagcgatatctgctacatatggctttaaccttcttctctgcgctatacagacaacccccctcacactttgacatactttagataaagttccaatccataaaaattgaatattcacctcttttgggggccatctctgaggccaggacttttgggttaaaacagtcatatccaccccagtgtccagcaaatcagtaataattttattatttattcttactttcaactgaggcctctgatcctttatagaagtttgccaaaatatgttttttgtctccaccagtcacgttccattcttcctcactagccaaactaccatctagagtggtaccattctttacaacaggcagtgtactatctattcatcctcctgtaagagattgtcctccacagtgactgtgaataaccagacctttctcaacccggtggccttcgagggtccccacaaggagtttcccaattgtaacaggtttccttatatgtctctggttgatctacattcattggtccagtgtctgcccttaccacatctcctacacaatccaggaggtggaggtcttctatatgtgacattatttgaatttccttgcctatggttccttctaacatgttctattttgccacagttaaaacatctagtatcctgatgccttctcgaccctctggggattgctcttcctatccaagttcctgtttcattacagttagagcatacggcctcttcatgtctttttaaaccttttgacattgcctctcttacccaagcttctgtatctcggacattatagtcgagattagctataagcaagacccactcttccagtgtgctgatcttatctttaaaggcaaaagtatccttttgcatagtgtatttgcattttcataagctagaggttgtatgagtgtttttctagagtctaaacctgctacctgtaactttagtggcctggatagtctttataaaaactttccggtcagcccctgtgctatcttagtataggtttttactctttctcctggttcatgaaccttttcccaggcatttaaggctgctgtcctgcagaaggacaatatgtgcttgtcatttgcatcctgagcctgtggctcagcataaagaccctgatcaagaatcttatcttggagagcttcataacctttctttaagcctggaagcttgagggcttttgctttctccctccatagagccctccactgtatttgagatgaattttcaagcacagctgatattaggtgttcccaatctatgggcattgccaatctattaggagttcccaatctattaaaagttgcccatgactttaataattctttgacataagggctatggagaccacatgagacaacagcctccttgatttcttttaattcttttagttgtatcagttcctattgatatgcaacatgaccatttcaatatttcttagatggtggtttctatgacatatttgcggggaagaccagtggtgtgcacataacaaccttaggaaggttttcctgatgtttgattggaataggtgcatcagattgggaggaatccgactgacattcatccaaagcttgtagcctggcaaccattgtctctttgagatattgaacctcatgaataagattctaaggatttcatagaatcattgatttttcttgtttcttcatttacatatgcttctaaacctttaatattctcatccttatatagtatctgaatggcatgtaaattgtcttctaaatatccaatcctagattccagcttttggcctgtggcagtatgaagctgactgctaacataacttataggtatgttaccggcaagtcataagcctcctctaacattgaattcacatgagaggcaaaaatgttcccaatggtctgcattgtcaccttatctgccattgttacagagtaataacccttagttattattaccaggtaaaatataaggcttttacctatctatggtttgatttcagctcagagtaactatgtagtaactatgattagcggatgatgcaggtggccagatgtggtagtgcaggtgtacctcgaaacagagttcagctgcagatggttgagttgtctcaaaacaatctgaaaaatatctgcatggctttcagactaacttagaacagatggaatggatagaattttgtcaaaagggaaggattttggaaacccacagggcagtagccagttttgggcaccgagatggtacccggtaacagtggtggtggaatggaaggagaggggcctcaggttgagaaacccctcggaagggcagctggtggaagccatcctcgggctgggagacagtcctggggaggcgatggtggtagccgcgatgggtgtccttgcttcctctaggaaccttgggatggaagacctgcagaaaaaaaaaaaaaatgcttggcagggccgatacgggatgagggagcgacaagggatgggaatgtggagcagccctgatggaagacccgaggtgggtctccgattggggaaaggcagggggcgtgggggtgaaaccttctgataccagatattgatgattacaaagtggagtcagagataggttgataactggtattatattgggggaaaatactcatgcaatggaaccagtgaccaggtttgcacctgagccagacggacccagaaattcttcccagtcagctcagccaagccagagagcctcatgagcacctccctccttcttaaaccctttctacgtaactgtgacgacacacaagcagctgtggtcagcgatacctaaaatcagggtttctccttatatacctgacccttcttgggtgaccaagaacctgagaatagatagcccagggaccacaagtaaaaccgtatactaccgttctcataaaatgtagcaataaaattactcctaatgtcattctgctacacgcacagatcaacaccttgctcagccgtcatcagagaagtttcctgcagcagatgggaaacatacagagacccacagccagacagagaatgagcactcagctctgaatgggatgactccatcaaatcccttccccagtgctcagagaaccccacagaagaggaaagtgtaagaactagaagagatggaggacaccaaggaaacacagtcctctatatctacatgagcaaagctcatatgaactcttggagactggggcagcatgcacagggctattgtgaaggtaacaagtagtaaaagcagagtgctaaaaaaaattctggagcaaagtaagcactcaatgagtgctgttatttttactacacacacacagaaacatgaacatgcatacacatgaatacatttttgctgtatttgtggtctgtattttctcatcagagactttaagactaaggtctcacttaaccacatagtgttatgataaatctttccaccaaagctgcccgagccctactgccacgtgtgcgctttatgccagctgcctgcctgagttagggcccaaattaatacacagagagacttgtattaggtacaatgctgcttggccaatgactaggattctcatctgttagctcagtctcaattatcataaatctatatattttataagacttaccttatcagatgccttactggcgtccctccttgcaggtggctcacatcccaccactggaggaggcaaaggggaaaaggggatgtttctccttgctaaatatgagtctccttgctatgtcatttcctgcctggatcaccacttctctactacatttcccagaatcctctttgactcctagtcctgtcttacttgctgtctcattggccaaacagtattttattcaataatcaataagataaacatataaagaagtacattctccaacacatagtatatgtaatataataattaccttttcttgaacaaattttttgtgtgtttttttagttttgagatatattttttggattatggaatgatattattacattaaagaatgtatgctacaaaatagagagcatatttgatatcgtaagtgaaataatattggtaattaatgtagtgtagtaaaatggaaaattggatgaaatgttttatactaagcttttctgaactatagatgagtgggacagggaaggaaccactcagatggagtgaggtgcgacctgtgatgggagcctgactcaaggctcaagtccataatataaaaacatcacattgtatagctggtccttctttgagccaccagctcccaaatgccatggagacttcttattaagtatgaaagcttggcctttacttaggcttgttcctaactagctcttataacttaaattaacctatttatattaacctaccctgcgtctcctcagtactgtacatccatcttgctctgtatcttgctggcaattcctgcctctgttcttcccagagttcccatctctttccggaagtcccacctatcctgtcctgtttagctattgtccattcagctctctattgaaacaaccagaaggttctttggcagagacacatcttcaccgtgtataaaaagattatgccacaacaatcttgggtgtgttttttggttagtagtggcatattcaatatatttttgaagattcgcatttctggacaaagccagaagagtcaaaattctgtcatatgctgtaggtggtttgcaaaaagaaatttgggtggaataatcaggaaagggagggataaatagaagccaaatgtagttctcaggattcaagtctccagatactgagaaaatcttgtatgaaagatatctgagccaatccagatgctgactcagtcaccatcctccagctgatggttctgtagaaaatcatgactttaatgttacttaatgagaagattgttccatttccacagcattagctgtaggaggggtcttttcactgtgacagtcactcttgtctttactggcatctttttatttcacatcagactccaaagccttagtcatggaacctgaagctccctcaatagcattacaaaattttgtgttatctctgtaaaattcagtggtgtcttctccaaatgaggtctctgaccaaggacttcagaatcaaaaggtttctcctatccaaagtcttttacaagagatgccagaaccagatgttctcttgtgacaccttctaagtatgtcacacaaaattacaagctgatcttccaattaatcacacacttaacatttatcaattgcatggccttgagtgttctgtggaaggtaacttccttcaagtcggagctaggatatgattcctcaaaaagatttctattacagaaattctcattgagaacattcttgagatttgtattttaattacattatatttcccttcccttgcctctctccaaatcctccctcctcactgtttgtcaaattcatggcttcttttttcacaaactgttattgtgcttttatattatatgtatttaatgagattgtgttgccaccagagctagtataatgtatactagttttttttccactgtctttcatttgcattcacaagatttaaagaaaggaattgttaaagagtgttacttcatatatatgttagtggatcaaatgtctgaaaataacacaaaattaaatatttatggtagtttgaatgtaattggcccctcataaactcataggtcactatagggaaaaatctggatatggggttatgctcttgtaatcccagttctggggagctaaaagcagtggatctcagagcccaactgtctaaacagcctggctattaataagctccagggctatgagaatcctgtctcagaaaaaacaagggagatgactgctaaggaacaatcccaaggctgacctctggtttctctatgctcatgtgcacacgaacccacacataactctttattcccatgagcttgtgttcccactcaaaaagtctactaaagggatgctggagacttgagtcagatagaagcctaagtgtaccacactcctggttttgcagcagttagaaatggcaatgagctaaaacctttgagtgtagctggaaagaaagaagtgaatggattttcctctcaagcatcctgtcactgagtaaaagaagcatgcccaccaaaataaaacacctaagtctgagatcattggtctccagatctgtatggtaaaaaaaaaaaagtgctatgttaagacacaatgtttctggctctttgttacagcagcaaatggctatttgttacagcagcaaatgaaaactaatacaacatggtagcagttcattcacctgtttagaaagagatactttagatgttctgtaagtatcatgatgaaaagaatgttatgatcaataattaaattttgtgggctattaagtgtttcagaagattttgttcttgcggttacaacctcttcatcttctctggggcagttttatgaagctattttttgggtgacagggtatacttaaaagtcttcttcccccaggaaaaagacagtctcaaatgtccccattttatggactttttatgtttttaaagtgtcccagtttccccataatactgaagtaaaaatttaaatctcctagaaataatttattttactatccccagaggtaagttcttactctaaagaataccatgttgtttgaaaggaatagcagtctgttacatagaggaattgcttgctagtggaccttgccttatgggctaacttcctgtgtgcctaagaataaggaagcatcatcaatcagcagtgtagtgtaaggcttctagttgtagtacctgaagcataacctttgcttttgcgctggaaatttagttcaatgatattttggtctagctaccatctatatacagggtctaggctgccccaatgcactgagttttaactttataagtctcacccaggcctcatcaagattagaaactcaagactccatagactaggcctaacttcaattgcagaagatctaggaacattaagaaataagtcattgaaaaatgcagtttatctgacttctgagtgataggtaggaattgaaagagtacaatgaaggaagttgtgtatagatgtatttaggaaggactatgtgagacagttttacaagagaattattaacaaaggtgcaaagataaatgatggcaccaattgaagttgagccaaagatgtttaccagtctgaaattaagtacactaaagagaataaccaaatattggctgtgcatagactgagatcaaaatggcaagaatgtcctgcactgttatagagtagaaataaagttgagttttagctgagacagtaagcgctccctccatccaattctcttttccctgaggcttattattctgttgtcccaagatggatcctttaacttatttgttttgctagaatttgttgatgattttttactaaaatacaatcctcatataactgtgagcaaggagacatgggaatttgggatgcaagataaccatagaaaattgggctagagatgtccctggaggtagagactcaataattggactgagtataactcaaagtagcctggaggcccttcaaatgaagcatagatgagtgcttccacaatggggaaaccctcttatgtacattagcttttgtgctacccccagtggccattagcaaatgagcacaaacaatggaaacctatgatggcatccatagttttgatttatgtttgaggtctttcacagagagactcttatccatattccatattaaatgcagcatttagggaaaggtgacaatgttgaagctttaccttcttaagaagactgttttcctaaaagaccagatgtctgggattggatgtgtgaagacaatcctgtattaaatggccacatgatgtgtctagaaataggtcaggaattctggcactagggaatgtccaagatctactagtttgaccccaactatcaatctaagcagtggttgagaggttaccttaaatgccctttctctgataatgagatttatgaccaccttatatgccatcctagagcctccatccagtagctgatggaagcagaagcagatacccacagctaaacactgagctgaattctggaatccagtttcagagagggaggagtgatgagcaaaggggttaggaccagactagagaaacccacagggacagctgacctgaacaaggggttgctcatgaaccccagacggatagctgggaaagaagcataggactgttcaagaccccctgagtgaggatgtcagtttggacgtctaggcaatctatggggcctctggtagtggatcagtatttatccctaggatacaaatggactttgggaaccccctctacatagagggatactctctcagcctaggcacactggggagggtctaggccctgctctaaatgatgatagactttgaagatcccccatggaaagcctcaccctccctggggagcagaaatgggttgggatggggagtgggtgagggcaagggaggtggggagggacagggaactgagattgacatgtaaaagaagcttgtttctaattttaaaaaaaggaaataggtcaagtgacaattttgtcataagggagtcagtgttccttttcataaaatcaatgcttttgtcattttatcaattcaagtataaaacagcaccccaattgctttcttctgggtagtattctacattatttttctagcccaaacttattagaaaaagatgagaccaagtgggatagtccctgtatcacccaacaagctagatagctgctctctctttttaaataattgggaaatgctggatgtaaattcatttgaaattagcataatttgctatgtttttatttttaatatgcaggaaatagtataccaggctccattatgagttacagaatgatttcattagcataattgaaacagatgctatttcttatgataataggtaaatgtgcaaaaagatattaagctactgtctttggatttttttcatgctgcaatgtgttttcaggcaaacaactttaacaatgatgtccagaagcatacaatcagcaggataataaaacaaattaaattttttcagccaagttagacctcccttgggaagcaccaggttagaaaattagtcattttttgttggcaaattaacaaaatataattggaataaattgcttccttgaatatcttagcacaatggctgcatccttatgaataactagacttggtttcaatgctatcatataggtccaaaatgctgaggatataaaatgggtttgatttcagaactgggaaatatagggaaatatcttggggatactacctaagtctgcacatgacatttattcatgttacataggttctttataaacacaattgagagcagtttaagtagtattttttagtatatctgaattgtcactgtaacatgtcatgtgatagcaccatacattattaatggcttagaagttgtcttagttagggttactattgctgtgattaaacaccatgaccaaagcaactcggaagggatgggtttatttcactcacagttccatataacatttcattatcaaacatagtgaggagattaactaacataggttgggaacctggagacaggaggtgatgcagaagacttggaggggtgctgcttattggcttgctccccttgacttgcttagtttgcttttttatagaacccaggacacctgcccagggatggcatacctgcaatggattaggctctctgccatcaacactaattaagaaaatgctgaggacacctggagagcaaggtctgcagaatcaactaagcagagttcatggggctcacagagactaaggaacagttacagagcctgcctaggtctgtgccaggttctctgcttatgtcatggttgttgacctggggtttttgtgggactgatgacagtgggagtgggggtgtctctgactcttttgcttgctcttggaccccattttctcttactagattgtctcccccaggcttgatatgagggtttatgactggtcttactgtatcttgctgctctgtttgcatgatgtccctaggaggcctgcacttttattgggggatggtctggggtggggagtggatgttggggggagggtagatagaagggaactgaggggaatggggaagcttcagtgtggttcagatgtattatatgagagaagaataaaacaaagaaggaaagaaaggaaggaagaaaatgccttacagctgtgtcttagggaggcattttctcaattgggggctccctcctctctgatgactcttgtttttgtcaagctgacataaaactagctagcatgatagtaacacatacaaagtttcagatgttagagtatttcagatttttaagttaagagctctcagcctatattatgagaagacatgtgtttctctgaattacattaataaggccttctgtcacagataatattcaaacattcaaatttatctttaggcatttatgagttggaatctgattactcattttagcttgcaattacttttacaaatgaatcatttcattgtctttctgtcatacacatacacacatataaatacatatcaaaattgccttatatctcactcattttctgaaaatcacttttcaaaagggcacgttagtgaactcaaagaatcccccaatgcttatcttcatttatttatatttatttatattttcagtttggttaatattttaaaataattactgttctggaaaaatatgtttcagctatatatatatatatatatatatatatatatatatatatacacacacacacacacacacataatatgtgtatatatcaaaacattgctgaaaatattgtctcacattttgtagatgaataaagacagaataagaagtttttataagttaataagaaccatcataggttcatatattagaatgtagaattcttagtcatagggaatggcactatttaaaaaggactaggaggtgtggcctatgagaggaaatgtggcactaaaagtagacttaagatttcaaaagcccatgtcaggctatgattgtctgtctcgctggtgggctctctctctctctctctctctctctctctctctctgtttatggatcaggataattttatgcatcatttgttttgttttgttttttttgtcttttttgtttgatttttttcatttttttgaggctttgttgttattttccctgtcgttttgattttctttttgagagagaaaaagatcatgaatttgggtgggtaaggagatggaagtcattcagggggagctggggatagaaagatatgataaaaatatattgtataaaaatttttgaataaaaattaagtattatctcaaaaacaaaaaataaataaaaattttaaaaagttcaaaaccaaaatcccaactttttgacatagtatttaattgcagtatgtataatcacaattttatttccatgatacaaaaataaacaaccctatacaaaagggcaaaacaacagcaaaaacatgttcacaaatgaaggcacacaaatgacctatgaattcatcaatgaagtgttcaacatcattggctcccaggaaaaggcaattgcaccaagagggctagttcaaatgctactttcattgtcatccaggagggcaaaagcatggtgttcactgattttagagagtgaagcaccttgaagaaatcagaactctctaagttaagccttaaagataggattctgatagatgatcaagtcagtaattacctcagaggctgaaacactgaggggaagcagagaggcatgcacccaaggttaacaatgttcaatctgcattcatactcattagctttgtgaccccaattatgcttcagaacttttctaactctctctttatatgtatacaaaatgtgaaacaatacctattttcagcattgttttgatacatatcaattattatatttacatatatataatatattttatatggctgatattgtccagaatagtaattattttataaagtgttgaggaaactgttagcataaataagtgataagtgaagcactggggcattttttgattacttttaaggaaatgaataaaatataaggatatatatatatatatatatatatatatatatcatatatatctatgaaagaaagacaatgaagtgatttatttgtaaaagtaattgaaaagtaaaataagtaatgagattcggactcataaatgcctgaagataaatttgaatgtttgactattatccatgggagaaggtcttatttatgtaagtcagagaaatatatgccttctcacagaatatgctgagtactcctcacccagaaatctggaatacgctaagatctgaaacttcgtatgtgtcacttctgtgctggctagttttatgtcaacttgacacaatcaagagtcatcagagaggaaggaacctcactaaagaaaatgcctctcgaagatccagctgtaaagcattttcttaattagtgattaactggggtgggctcagtgcattacaggtggtgccatccttgggctggtggttctggtttttgtcctgtgacagacagttaatgatgtcttttgatgagcaaacattttatattttgatgagttgaatgtattacttcttttcttttgtagttattgctttatgcataattttaagtaaatgtttgtttaatatcatgtttcttttgtatgcagtccatatttaaaactgtattgaagtgcctaatgagatttctttgaactttttccattttattctataaaactctgaaaattcctgaccattatgcaaaatattaaactcatccagtaagattttctcattttaggcattggtctttgctctccaattttgatatgattattcatctattgaacgtgtgctgaattacatacctcttccttctgtatgattctagcttccttaaatagttaaaattttcttgtcttttttttctttcaattgttagtcaaattattctgtttgttgacatgtatggtcaattttgattgtattgatggggtgttttaaatagtacagtgtggagattacatcttgtgaggagtgtggattttgttttcattagactctttccttgattaaactcaaattgtacatttggcaccttctgttgtaagaaggatctgaaacctctgttacgaatctccactatggcactattcagtagtcagcctggtgatgccatggtagagatggtgtgtgcatgaaggaattaccaacttctctatttttgcctgattttttatgactatcatatgtcttcaaataatctggttttattttaatgttttgtcacaatctgtaatttaaacccatgttaaacaataaaatacaggcaacttcaacctcactaaaataagaactctagacatgtgttcttatattaaaattctataaaattttgatcataatattgaggcatcttttcaaactccctaagtaaatctactaattaactatatatacaatataaactgtggtaaatatctgttcaagtcaatgggcctgactatactgaattgatcttatttggcatgtctgcacaataatttcattaagagattattaaagtatcccataacatgaataatgacatgtgttgagaatcatattatcatccaccacaattatttactattgtaaattaattttgtcactatttgtagaccttgatctgctgaatcagccttaaaatgaggtagtctttctcttgggagacagtcttgaaatttaaatgcttccactatctgaaagtagatttctggttgacgccatataagtcagcacctaagtcagaaggtacttgtgcttgtcacagttctattgctatgaagagataccatgaccaaagcaactttatgaaagaaagaatttaactttgtgtgtgtgtgtggggggggggggttcttactgtttcagtagtttagtccattctcatcacgatggggagcaagttggcatacagatagatgctgaagcagtacctactaatccataggcagagagagggagggagagaagagggagagagacagagacagagacattggtcttggcatgggtttttgaaaacccaaagcccacccccagtgacatactttctccaacaaggccacattttccaatcctttcaaacagtgccactccatgttgaccaaacattcaagtctatgagcctatgggggctattctcattcaaaccaccacaggtactaagctcaacacaacagcaatgcccaaattagtaacaattcaacataattattcatgtgtacttggaattcagcaaaaaaagaatgattctaagcttggatatagaacagtccaggaggatgccaagaataagtatctctgtttttcagagttcatgaaatgaagagtgttgtcatatatatcagttgtttctctctttggattaggcttctatagtattaattaactgtggggaaggaagcacggcctatattgcacaggccaggtgttttattccctgttggttgcagcaaacagcctgtcaatattgcacctacatagtatataactgttgcttgcttaagtggctcctagttgcagtttaaaacaaaaattgtattaaataccaaaagtctatttttaatatttttgcttcccaacagggcttctaaggagcacattgtggtggaaaaatgaggccttcctatgtgtatcagagactttacttctctgctgatgccttaattttactcaggaaggaaattattgacaatgcaatagcacaggcagattaaactctcaaaaatatctaatagcatacacagtaaaccctgggccagtgccagcatttttatagcataatgttgcatttaaatacactttttaattttccaattatgtgtacccatggggaacactcatagtaaacactccttctggaggattggtgatatgacttccctaccctaaagtaaactggggagttttcagcaaccttgaagtcatttgctttgatttaggggtttgaatgtatatattcatatcccaaaacctgtgagagaaactatggtacccaacatgtcagtcactctgataaatttatacacttacatggtttccttacttaatcttcaaaagccaaaaccaaaacccagatgctaccaaaagaaatgggtacagaaaataggaatatgattacataaatttacatagaataaataacaaatttggaaatgatatttcagtctgatgctgttcttcaaataataccttgaaggcttgcatattgggaacatacatataaacacacgacttcagaataaactgttctattatcacagcagctgtgaagactagggagttcttttgaggggtagcacacatgtcagaatgtttaaaaatggatcttggggcatattctaacttcagggaatctttctctgaggtgtataaaactgccacaattgctttctttgccttgaccttgctttctgtctaataggttgattccatagcactctttaaagacagctgtttggactacacacttgtcatttgcaaccaaatagaaggaatactcttcctttttccagtggcaaaaaagtaaatattgactctccagatccttattgatctggcttgaattatgtgtccatatttgtgtcagtcaccatggacagaggaaacttctggaaatgattttgtaaagtgttaaagtaattaaaatcagatataaaaatctgttacaaagctattttggttaaccaaaattcaggatacctaattactttccatgttatttcttttttctccatttcattttttctgacactattgttttctaaaacttagatttcctggagaactctaaaacttagatttacctggagaactttgttttatcttgacagctgaaatccattaaaatgctcaactaatgcatttaaaggattcaaataaaaagaatttgaatttcagtcctttgagtcatgaatgttgagaatctctaaagtccattaaattcttacagttatgcttagcaggcaggtctcctttctactaatgtgggttcagtaaaagcatgaaaggttaagtggctagcgagggggagcctatgataatgaaggtggggactgctgctgtttttattgtaagttggcatttgctttaaatctatgtttctttgtataacaaataacacattgcaggctttattaaaagatttcagaggttctttcagccggaagtctttgcttcctataattagcgtaacaggatctggtcccctgttacttaattattcttgaaatcatgtaacagaatttcattaaaaaaatcttatatgtagccataatgctactttatattatcagagaaatgccatttaaagccatggttttgttaaaagaaatatgacttctgctatacggaatgttctttgttttccttggtgccgtgatatatcaaagtagaagttattccacatatgtgtaaaaatttatcagtattttttcctttgaggaggaaagtaacaagtagatggcacattactggacctgttagaggaaaaagtgggaagtacccttaaacgaattggtacaggagattgcttcctgaacacacgctagtagcacagacactgagatgcacaattaacacatgggacctcctgaaactgagaagcttctgtaaggcaaaggacacagtcaaaaagacaaaacggcagcccacagtatgggaaaagatctttaccagcccctatctgacagagggcttatctccaaaatttccaaagaactcacacatcctactatgacgagaaaaactacaaatgaggtcatggaaccacgattcagtattcattggcttctttgtccctgtgccacctcaatattcctttagttgtttgttggttgaaagctaagttgtagagatgtttttatctaacgtgctccaggttcctgggtgtctaaatccagctgtggtggtgacgatagtgttaatggtgatgggggcatcgcacttttgctgggcatatggcagtgggttttttccatacaataccctgagtggtggctcagtgatagcgtcaccctggtggatcagctccccattttcttaacgttactcttagaagcattgcctgcatcacatcctttccgaggagttcagctcttgatcccctgtggtaatgtgaatgaagaatgccccctctaggttcgggagcttttgagtacgtgtttaccactttatggtgctgtaggagacgcaggcttgcttgtgtacttatatcactgagggcggatcttgagtgttgatatacttcattttctgtttgctctcttaactcctgtgggacaaaaagtgactacccggctttctgctctggcttccggttaccatgattccttggcattacagataacccctcttgaactgtgagccaaaataaatgcttcctttcatggattacttttggtcaagatattttactacaaaacagaaaaataactaatacaacccctatgtgtacccacagtgaacacagtgatttacctgactgactttacaatgtgtcttccataatccagatttagtgcttggctagtctctaggagaattgtactcaagaatctaagtcctcaatgtttccagtaacactgctcggacacccgttgggggaggggacgagaagaagcagtaccaatgactcaggcgtgggagtcagtgagtagcagagcatactgcagtctcacttattaaggaagttagacctgcctttgtaccccctcccaaggtcccattggctcaggcagttgactgctctgttgtcctttcctcattggtgtctctgggtcaggtgtctccagcaatctctgtgcatagaggcaggcttggctcagggaagaagtgcctgcctcacacgctcatgcaggctgatctgggcacctggggcttgggtaggctggctgcagtttctcctagacctctacactcatttttataaacaaacttgtattcttatccagatgctttcatctagaagtttcttcatctggagtcttcctgctgaggcttacccaaaggtggagtggagtggcagccagaaaggatgtctcctgctcacactctgattttctgttccctttcccgactctatggtccttaaaattgcaggaattctcacatcggtactgatccactgtccaccaaatgagttagtgctctttctcataccattgcacaaaatatctgaagacttgcacaaacattttctgtgccaaaaaaagtaagcatttgtctacatacaccagacagaacaccaatgatagagtaacaaaacagttcttctcagataaatactgaagaagtcaatgagtgttttggacttacaagagtgttgttaaggagttagttacaggagcacgggtggaagttcattacaggagtgtgggtaaccttaaaacagttatatcattgaaaagtctcagccctgaatggatggtgacatctttatagatatatagatggagtctttctttcagttaatctttcaggctccaaatacgatagcatcctgtgagactacatgcagctaaggcaaaattacctgctactttagggaagggcagcaggaagtagctgagataaaaggtgaggatccacctgtcctccccaccttcctattatgggataggcaagaggtatcagctgctttgatgaagatggtgatggctataatgctccgaggacggtgtcccacaacagataggaactcctgtcttggatttctgctctaatctattctctatagtcaacaatgctgctacatgttatccaatggctttgctgagacattctttgtaaatttcctctggcttaaagtatttaggagtatttttttcctacctgtactgaacttgaacatgtagacttgtcatttatttttttattaattaaatttattttgagacagtttcacatgtatatcatgcctaccgacccttctgatcggcctacttctctgaaatctctccctccctctctctctctctctctctctctttctctctctctctcttcctcccacttctctctctttctcatgttcatgactattcatcttgctttgtgtcactgatacactaggattgaccagggctgcctgcatgaccatgaattcataactatctgttgtagcctagtaggctcaacagttggtacatagctaaagatgttggctgtttaaaatgaagttgtttgggtttactggccaagcagcctgaaactgcttgacaaatatttgataaaactaacacttacaataccttgaaatcagatatggtggctatggtgtcaggagcactacagaatgagttagatgaataatgtttgctgctttttagcaaggatcagagagaggtgagctaagaaaaaggatgaactgttttggaagcagagatgagaagaatataaatatatctgtgaagggtgattttccccaaccatggtggatagtaagaatttactgacagccaactgaaagtgcccattgttttttgtgtctcagactgcaggaaataaaacatgacctcagtctccttaaaaccattctgaaaacagactcactgactctaaactgacatctggggaacctgcacaggatcgaaataggccctctgaatgtgggtgacagttgtgtgacttgggcagtttatggggccactggcagtgggaccaggatttatccctagtgcagaactggctttttggtgcctgttctctatggagggatactttgctcagcctagccacagcagggagggccttggtgttgcctcaggtgattgtgacagactttgttgactccccatgggaggcctcaccctctgtgaggagtggagggttgcagtggggaatggtgaggggattaggagaaagggagggagggggaactgggattggtatgtaaaataaaaaaagattgttttacaaaataaaaacaagaaatcaggtaataaaaaaagaataaagacattgcttggggtgcttaagacactgtcacactcagaaactagtgaataatatattgaaatgctgaatactagttacttactagttactgctgcttttgatttttaactagacaatcgaccaatgatatgtgtcctgagaaacagtttcaactagcaatcatttctaacttaactgcatcattttcggagttagaggtgatagagaagacccactatactattttctagttcataactcatagagaaaaatgtctagaaaatgcatttcctaatgtatttggaacttttgaagaatatctggtacttctcaaaaaactttaacttttcatttcttcttggtgtaacaacaaactaaattttgggcaatgatacacttaatttcttcagagtagctatcaatgcaatactaagtaaaatattaataaaaagggaaaagagacatggtgtatatgagaattctctatcttgattcatcatagtacaagagtgtgtgcacacacactccctcacatgtatctgtacatattttaacatccagtccagcttcttggtagggcttctgctaaaagaacctatatgattttaggacaagaagacttgtccttgataaatgtcagatgaattttaagtctaattggataaactttatttccttgtgatccatttttgtaatacagtttttttttaaaaaagcagataatagcttttttttcttcactccaccatagaggctgcattttcagagcaatggcctcctcttgcataggcagtgctctgtgatcgagagcagtaatagcttcaaaagtactgctcaggaaatgccccaaacatctcactaaatgcactcagttcatgttcccttataagcagcacaagcagctcagagcaaaggtctaatcattgagcacaatcaaaagccttggtgctacacaccttgtgtttctattagaacttactggcttgtagtttatataatcttaacagcggcaaccttgcattcaaacacctggagatgtacaaagcttttgctgtgcttgatcctctttaatagtcacattcccttaggaaggaagtatcctcacttctaaatgagaacactaagtctcgggagagcataaatacgtcgattaaggtctcctttctaataagtggatagctggatataattccagtcagcatgggctgctgagttagggcttccccactaggttatagtacttattatttacatgccagtgtctctcaattgcacttgaattccttgttaacaagaagtgtgccttaatcatttttatttcacaaatgtagcttagaagaagcctggaagagagatatagtacatttggtcttatttttcctcaacatgtagacatggttggggctattaattaagaacactactccataatattttcttttgttttcaaaatttttttatgatgtgtgtttgtgtgtatctgtgtgtaggtatgtgcatgggagtacaagttcctgtgaagaccagaagaggttgtggaaattctgaagatactggttgtgagctgtccaaggtaggtgctgggaacttgggtcctctgtaacagcagtatgctcccctaatcactaagctacctggctagcccatactattattattattattattattattattattattattattattattattattattatagtgtgtgtgtgtgtgtgtgtgtacaatttgggcgtagggcatgagtaccacagtgaatatgtggtggtcagaagacagtcttgcagagctggttctctccttttacgtttatgtgggttcaaggatgaaaacccagttgtcaggtttgtgcaggaagtgcttttacctactgagccatgccatagcccaaatatttttaaccacttgccatcataactattgtggggcattaacattctggaagtctgctctacagaatgtgcctacagaattatatagaagaaaaaaataattctacttggagccagatagtatagtatatagtactgaaactcacttgtgttgtggtcctttattactgtgtgacattccctgggcaatgaaagacattcttgacctcttttttaaatcccaaataggggagtggatgcttctaagagcccttctgggaaagcatatgaaattatttttgtctatggagcttacatgatgatcttgctgcctaaaatcccaaggcccatttaaattgttatgagctatcagacagttccctcttatgaggaagcaatgtggtacataataacgattttataactgagtatttatttatcaagatccatcgggtttgtttaatgaaaattatatgtcaggagcctgtaaatttatctgcactctaccctcataaaatgaaccttgcctgaagttccattctcccttcatctgaatagatgttttatgatcacagctgtgatgtgcattacatcctgctctcctgactatcaaaagaagacattgcctttgacacagtgaataatgctataagtgatgaacagccacaaatctggaagaactcccagccaaatccaaagcctgatctattgtccatggtttcctgttctctgtcctggcatagaacagtaattcagtgcagttctttgaacagttgagtggacctgcttaggtctgtgtgacttatatgaactctagcccccttctgcaattacctgcaattgtggtgttctgcatctagaactcataaggaagctggaacctaaggtttccgggggttctgggtaataactgatcagtgtgaacatgaagccaactaccccattcctgatttctgttttgctcctaacctgttctgtggcattgggaaataccctttatttcctggcatcttggattataccgtgtacaataaaggagccaggatgtgtgatcttcaaagataatgttttatagttatagaattgcattgtaggaacacagaactatagggtacaccatcctttgtgtagacattatgttattaatttcattaataataaatttgaattactgcagctatcagagtttgtaggggaaacaactgtctgaaaataatatatgtgcttagatttagatttgggaagatttatattaaggaacatgtataagtttgattttctgtggaattttcacagaagtaagttataatgaaaagccaacagtaaaaaattgaaagaatttatttgacactcccatacttaaggctcaaggaacaccatgttagcagggcagaatgactttaagagccagagatcagggcgattgacatgagaatgtgtctcctagtaatattggaagctacactcataaagtatcactaacataattgcccaactgtgaattgaacaaggacaacaccaaggaacttgttagaatatatgaggaaaaccccacaaggtttcaaacctatacaaggaactttaggcaactgaggaaggctcagggttggagtggtggtcttctccatgaaaaagcacaccaattgtttgacccatgcgacacagtcagccctgaaaacatgcatataagtaatgatatggattgaataggtcatatttaggatcatatatgtgcaaatatgcatgcaataacagtaaaataagaggctatgaatttgaaagagaagaggggatatatggaagggtttggaggaaggaaatgggaacattgtaaccaaattataatctaaaaattaaaaatactttcattaataaaagaatttatttgacacaaaaataatatttttgttaagagcctacattttgttcattcagttgactttttaacactgaagatttctttaaggctgtaactctactgctgcttctgaagttgttttagaggcatgtcttgaattttctttagtctgtcttgaggaaacagatttacctgacaatagtaaacctcaaaactcattaaatgtaatacctcagattctattccaaatgccatttctaactctacagaggtttattgaggtgtatagaatttgagtctagtttattttagtgtgccatgcttttatttttctgcaatctttttaatagtaaaatgtgtaaactttaaaaataaaataactttaaacaacaataaattttatcactttgaaggtccaaagtgaaaaaatacccaacaattcctagactgtaacatgtggtgctaagaagtattggggaaacgaggtttaggaagaatttgggggttgttgatagaactctaaagcagctttttaaccaaggcaggaggaatgatagatattggattttaaaaagctgaaggaggtgagaggagaaagcctgcaaatatctgtgggatgactgccatgtaaacaccccattttggtaagttaataaatattcataaaactagcatggctgaatcagcaaggatattagagagcatagtagggtaaggctactaaagaataaaacttacttagaaagtcatggtttggcttgtaagaaatagagtgttttgaacagaaaagtgtcacaggaaacaatggagattgggctgagagcagcatctggggtacaagagaggatcctcttatagtgacacagcttggaatgccagggtagtggcagtgaactagtaagaagtaatcaaattcccacatgtgtgaaggtaaaatctgcagggttggctaacattctgtatattcagtatgagtgagcttggagttaatgatttaccctggaaaagactagggctttgctttgaggctacatgaaatagaattgtcatttaatgagaggaggcagagagtggatggaacaggcatagggtaatattgaaaatcagatgtttgttttagggtatagtacctctgcccccacatgcacagtttagttttccatggtttcacttaagcatagtcatagttgaagcatattaaattaaaaatagcccagataccaactatttgtctaaacttaagtgtcattctgagtgacatgatgaaattgcataccatattctttcctgcctgaagcaggaatcacctttttgttcatgtgaccatatagtgaacaatatctgcacattaatagctctctctacaattagattgactgtcatgcactatggtactaaattccaatatccttgcctcattcaatatcccatagttcaagagtagtaaggctacaatttgaaagatgccaatagaaagggatagcaaccttccatttaagtaaaatatgaaaattaacttaatgttgagagaaaacaattgtatgttgagttgtgaagactgaagatgagcatgaattttctagatgtgaaattgtggaggagaaagaaaagtggttttttttcactgtttgtagtttctggtgcaggggctatatacacagtgtcgtaagtgcttagttaagatggaaaaggcaataaaattgtgggtatgagacatgagtaacaatgtgttctgattgatattagcacattacataaaaaagcagtatgcctctacaaagcataaattcaatgagagttcccatgaaataagtgacaacaagccatttatgtaaagtaagggatgattgcactgattcaggaatatgtgtaaactcaaaatacaaaatatattcaggaggcagcatcttcctatggttgggggcacacactcacatttctaccagagttgatattgatcaagaaagaatagtttccaataggagtcttcatttatgatgggaaaagacttttcttgtacaatatatactcattaaatacaaaagaggcatgagggtataaaacatggaagggcaggttcacgctgatgctatgtacacatgatggatgaaatgaagcacagtgcatagatggaaaatctaccattctcttaaaagaaaaacaaaagttaaaatttgagagtgagaaaataattcaattaacttgattatgaaatattttttaattatttgattttattattagttattgttgatttcttaattttctgctatatgaattaaattctacacatggggatttctggaaaaaagctgtagtatatataagggtctggtactttctcttgctccaggcattgatttggtatattggaacatgtatccaataaataaagacaggctattctacttcaaatgtttaaacttagaatatgtttatcatacattctatttgagattattaggagaaaatcatataaacaaatactttaatctttcctataacctttcaaagtaggctttatactatggtttcatgatggatctatagttattatcctgtttatatgtgtgaatctatacttattattatctagaagcagagtaaatatttgtattcaagcaccctgtgtctcaaaccaaagatcctatgttcatggccatgttcatccctatattgactttggcacaggaaattgttatttcaagaaaaacaaatgacacttaaagaagtttactagggattgtcattatcaatcattaaatagtcatatataggcatatatgtgatattttaaatctaatggtagatcttataacttaatggttgacaaagttatatatagtctatgtgctctgggtaaagtttcattcatttaatcacttactaattttctttctcatttaatggtttattgagttcccagtgagcaacaggcattgaaatatgaacaagatcatagtatcttccttccattaatgtgtactttagtggaagaaaagaacacacatgaaataacctctgcaaattcaaaagtcaactataaagagaactatgagcaatagatgagaggtacaaggggaaaaagacctgtgtaggtgaaaggtggccagacttggagactgagggagacataacgcaaatttccatcagctaaattatatggtgagaactttgaaagattcacaaatttcttaactgtctctaatacatccttcctctgagatgatggaattcattcttagtctttaatgtgagccagtattctttatcacaaatctagttacggttgtagacttgagtatcatgtctatggtctttagaaaacaacggagaatccaacataaaatatgctagctatttgattctgatttaaaccacatctaccaagtattctttgactttctctagagtattgtcagctaagcttcattcactaatggcctcatggcaaatagcacaaatgcaagactggtgaggagttatagcatgttacgtaatgataatttaaacagaaaaataatgatgttgataatttttcagactgatttaaccatttcacataaattgcactgagctcctcgaaactctgtgacaagaaatctcagcctttaatgttcagcagtgccaatttagggagatttttaaacatttggcattgggtaccaccagagaaataaaaaatcagaattgttatcataatattcttgaaaaggataatttaaaaaaaactttattttatgaaatatggccagccttcatgatcagtagaccaggtcatactattttcatagtgtacacaaggaaacaaaaaaataatttaaagaatgatgtgtattactaactcactgattcttgaatctctcgatctggattcatcttttaaagtcaatgttttccattctttttatttctttcatattttgaggattatatagtataacatacatacaaattctgttgggaatttttagttttggttaagatgtaagatgatgcaaagccttttcacactgccagtgagaaaaggcatcattaagttaaaataataaatgtatattgagacaaataagtgtaaaaccatctatatttgagagagagtatgtgtgtcagctctcaaataaggaagggacaagaaacattatcatgtttgcagaggatattggtcaagggagacctgtatctgccaaatgagaagaagctagcaaggctgtccactctttctgcacctattcaatatagcactaaaatcttagctagggcaatggggcagctgaaggagatcaggagtacaaattggaaaggaggaagtcaacatgtcttatttgcagatgatataacagttacataagtgaccctaagaactccactagggaactcctacaccagataaacacactcagcaaagtgtcagtgtacaaaatcaactcacaaaaatcagtagctttcctatatacaaatgacagactgagaaaatcttttgaaaacaacaccttccacaacagcattaataaaatgaaacaaaatatcttgggtaactctgagcaagtgaaagacttgtacgataaaactttaatacattgaagaaaagagttgaagatttcagaagaaggaaaggatccagtggctgcttccttggttgcttgcccataaacctgagaataactattttcacccttggtagtgattgcaatgcaattgagagagatgtcaaattaaaagctgtgtccagcaaatcccttggcagagataaggagactctgcagaccacacatgagttttactggatttccagttgatagtgcctagagtcatccgtgcttcacttactggctgggaaactgtccccagaacctctatccttaggactgatgcatatgcaagatttggtctccagagctacttctctggaatggaatctagaaacagcacttctatgttatcctcatggctttgtcagtgatatagatttaatatttgccctcatattttttcagtcagaatgaatgtgggaggaaagcagtttacttccccattatgcacacagtagccttcctgcattcaacacacaaggctctgaaggtccttatgaaggaacaatagacaggctctcagatggtttgacaggaaataagaaagtggttacttttagaaatatactgtgcattgatccagctaaggatctcactttgaagatctctcttctgcaagggactttcagcagccacatctattattacaaaggtgaccgatcctgagattgtgttcttggagttgcagatactaacgtctcagcaatgtttcacacagagtcaagttagcagtaaaattatccacaatgacggtgaaactttttctcatctcattccatctaaaacaagaaaaaaaagaactacatgaaagctggctgcatatgccttttaagaatgggaacattttccttatcctttgaacaatgaaaacattcttacaaaagctgtgaaagtcatggctgagtgggaggagtctatcagtgtcagtgcagcatctaatctgatactcctttcttctagcaacttacaataaaagcctaagcagaccccttcctatttaaaagtatgtgcaaactgtaatcaggacagatccttggagctactcacaggcgtggaacataactgtgtgtattttaaatgtttgttcaccaatattaggattcttctctgctactaacatatttagttctaattggatgtgatatctgggttccatatccatgtttctgggtcatcattcttaacaaatggacttctagaattaaacacactgtgtaagtcattatgacttgctacctatagaataggccttctcttgttctctttctcttggttgggctgacattatttccttttagtctgactggtgattgcctgttgacgaagacccttaattgaacacaaaccactgagatccaagtttgtaaggttgctttacaaacaactttggttgttcctgccaagcacaccccagcagagggattgagggaagttggtagggcagaattcatattgaacttccatagattaatttctgattcattatctttgtcagataatggatcgatggaccatgggagattaaaaacaccatcaggatgtaaagcaacatcagaatgcaaaagacatctcccagtggtagtgttttatcacatgatctcatctaagtgaggctgattgtgtgctgtataccccatgggagacaaatttgttcatctttgtgaagcactactctctaatgaggtggtcttagcaagcccacagtagcctctgttgctgtggctatattaaaacaggctagaacttggatgtgggagaattagttctctaaagtcttgatgtgttagacataaattgttgataacttagaaagaccattagcttacatgccccgtgttctagtctctattttcaaaatagaagacttttgtcattgtaggctcttataattttggcattatgaatactctggattatggaatatgtatgtgctttatatttctcaaactattagatctcagatgttgtaattttttcaactaattgatttagcatatatatatgtatatatggatatatatgatacatattatctattctttaatatagtcttgcattgtataactgttttggttaggattagaacataaatacaatgttagtctcataatattatgataagctgaaaattcctattgatgtcatagctattgaaaagtcatagtacaatgtgttccaagcttgtctgatgctgatataagctgactatggtgctgcctacatacacataaagctacataataaatagtaacaataataaataattgtcactggtttctgttgtatatttctatcatcattttagactgcatttatggtctgttttgtaaagagtttagtataatataattttgccagtatctgtatcatatcatccatctaactttcactgtatcctgattgcatcaagaggccatgttgaagacttcaagtgaagatcagaggtctcagttttcataaagacctggattttatttccagtaaaaaaaaaagagagaaaaattaaaataccttcttgaatgattcctttgtaagaatatcttacatgtaatattcatacaagatcaagattactaaatgatgtgtttctgaagccatattcctgtttgtcaaaggatagatagctgtatatccataccgtcataaaatatatggtttgatttgtgttctttatatttgcagaaagtgttgcaaataaatctcacgactcattttcttacttcttataatgatttttaaggttcattaccgttattgtatatgtgatataattagttgcttcttggaactacagagttttatgttatataaatacctcctcaatcttccatgacataccttcttttattactggtgtcttgtatcttagaactgaacaagacaatacccatcttttccctcatcacaatgtcatgataagcatatctggaggcatatcctccttctcactctgtataaatcactccttaaagagttttaaattgtggtaaatatgcataaaacttaccacttaggctaatccttctcaatatcagaaagctttctggggcaaagctaccctggagtgagatcataaagccataaatcacacagacatttgatttttctgaacctgttacatttctttctgtcctggaaaaattatctcattattattctcatttgcagtgcaccagtgttcaggtccaattcctcaacattagatattttcattttctcattttttcactttcttgtgcatattttccattgctttgattaccatttacttcatacctcaaatgagcttccttaggttttctactgatattcaatattttcttttttatctaaagatcttttaaaaataattcttacattattcccttactttctttgaaatttgtgaatatgcactgccagttttctatatgctcattatttataaacatcctataggaaatacatagcttttttcattttttattgaaaatatatttttctcatacaatatatcctggttacagtttccactcactgtgctcttcctagttcctccccaccttcccttccctttggatccactctctttctcccatctattagggaaaaacaggcttctataaatatatagagagaagactaggtgcaaacctgtgtaggctctgtgcttgctggctcagtctctgtgagatcatatgagctttgcttagttgctttggaggaccttattctcatggtgtaccccataccttctgggtctcacaccctttctgtttcctcttcttcagggttccctgagctccgagaggaggaatttgatggacccatcccaataagattggtgtgtttcaagaactctctctcagtataatctctggctatgtgtctcagctgagtgtggcagcacaagactttaatcccagtacttggggggcaaagtctggtgaatctctgagttcaagaccagcctgagctaccaaggaaatatgtagttcttgtcacatccaattaaaaatgataatattttaaatatatttttggaaatatcatacatgtatacaatgtttttttatcatatctacctcgtctatctctccctttaaactaatcctgaatcctccatccaatacattcaccacacaactttatcttcttttttttttcattgtatacaccactatatatgaatggatgtgaggttatccactgacacatgggtaacctatcagtggccatacccccaaagcaaaatggcttttccttcccaagaagaaatcaactgccaattagtttcttagttagaggtgggttcttatgagctctttcttcatcgtgctgtaattttgaattattaatcatgtgtatagataacttgtatagataaccatactttctgtgagttcatgagttcaatggtcatgtcatgtctaggagacagcattccacagcacttcttttctttgagccttggggacagggttagtttagatgtctcatttagaactgagtacccacagttggtttagtatcagcattttggttagttatgagtctttgcattaaattctgctcactgtaccaaagaagcttctgatgaagtttgggagcagcacaaatatatagatataaagtaaatatttagaaagcagtttgaccttacaatttattaaagttcctcccccagggcctagccatgagctttgaccaagtgtatattacaaggaatgaatgtcttcctgtgaagcaggcctcaagttcagctagaaagtagttggttgcttccataacagccgtgcctctattgccccccaggaagcacatcttgcttggaaagtcagttttgtagtattcagcacccactgatgggtatggtcattgacatcttttctcttccaggagcctatgtagcaccttctggcattatgaaacctagccagctggaaagacatttccaagttagttccatattgatttttctatgtgcttcaaatgaagtatgtgatgccttcagtaattgaatgttactctatagttatgaggcacaaccaagagcaagggaaattgcttgggttgtcttagtgtatcttgtggctttctgaccaataactaacagggaggtatcccatatctgacattgtgtttatcatttaataaccgatgatttataggagtagcattgtctctcatgcagagtacctccattaaagctcattttattcagctatgttttataattagcacacaaattgtgagcaattctttaagaacatttacttacaaacttggtcaaaaatatattctctctcttttttatttgaattagaaacaagattgttttacatgtcaatcccagttcccactccttcccctcttcccctaccatccccctcccatctaaaaccctacctatcccatatcctttctgctccccagagagggtgaggccttccatagggggtcatcagagtctatcatatcctttgggatagggcctaggcctacccctgtgtgtctcagctcagggaatatccctgtatgtggattgggctcccaaagtccacacctatgctagggataagtatgaactactacaggaggtccattagatttctgaggtctcctcactgaaacccatgttcctggggtttggatcagtcccatgctggtatcccaactatcagtctggggaccaagagctccctgttgctcaggtcagctgtttctgtgggtttcaccagcctggtctggacccctttgcccatcacttgttcttctctgcaactggattccagttcaggtcagtgattagttgtgggtatctgcttctacttccatcagctgctggatgaaggctataggatggaatacaagtcagtcatcaatctcagtatcaggggagggcatttaaggtagcctctcctctatttcttagattgttagttggtaccatctttgttaatctctagacctttccctagtgcctgatttctctgtaaacctaaaatgtctccctctattatttgcttgtttaaaaatatattctcttatatttactcttgtgtgattatttttctgtctttacactgaggtatttgtttatttagtacataattggatgaaattaaaaggttaaaacccagctttttctccatagagtaagttaaattttacaaaaaaattaataaactataccatccatttcttcctactggtttgtagaaatagctttctcttctggaagtttttatactgcagggatctattaatatttatgctatggtgttctaataactccatttccagtttttgaattagttttatacctttaaaatgcaccacggctctgtaataagtataatgtctgatggagcttgtctcccttcttgttctttcataaagttgatagcctattcttggctttccttctacataagctttagaatgagtttgtttaatccttctggctatgttttctatggcttttgtatcaaactcatagattaattaggaaaaaaactgacatcttttgtgtactagcccccatagcatattgctcaatttattaaaatttccttttgtgtcttttaatgtacttaggatactttttgtgaaaggccttatgcattcactcttgggttagtttctatgcacttttctttagttaatgcttttattagtaatgtcttcttttcagactgtacattttgtgaattgaatctagtaagttaaaggatgttatgtgctgggaagaatagatgttggcaatgtatacatatattcagttatcacactgtactctataaatatctgtgaatgaaatagtaattaattaggaaagcatacatgtcaggctggatatatttataaaaggatgaaataaatgctttatatggatgatttcccagcagagataaattgtgtgattcaggaggtagaaggaaagcaagacccattatcctcagtagctattgacactcaaaagagcttctgatcacaccctgctgctgctggacacctgttttgctacctctttgcaaattcctatattacatccacactaatgcaagtagttcaagtagtttcttaggtttccctcaagttccagcactgctcctgtgtcagatttccactctttttgcaacacccagattcctgtaccaaactcattatttatacctcacacacagtgactctctttcttgtttgatttctggctgatataaccatactgatttctttttttaatatataagcgaaactttaaagcatatgaaatgttcttacaaaaaatatagggcttaaataacaaagtaagttgccagccttaggaaatcattaggtaattcatgatgagataaacaaaagagaatggtcatgatattcccccattaaaacaacacaaaagcaaataaccaagctacaatctatagacccagagaggttagataaagaggagggtctaacatggatgcatggatctccctggggagatgaaaaggaggtaaggatgggagcagtgggggggtcatatgtgtgtgaagaggaagagagtacaggtatctggaattagagagatttaagaggattttggggaaacctagtgcagtgaaaacttcctggaatctatgaaggtgatattaatgaggacacctagtaatgggaagacagaatctcaactggctaatctcttgttaccagacaaggcttccagtgaagagactgagttgcattcagttgagttgttggccaagggaatcacatgaaaactcccaaactacccacgctattgctaaaacaaaggattgctctttgcaagatgaccacagaaccccactgatgaggacaacactcacacatctcattgaacacggagaggttgagctggtgcttacctggagccttcactcttatgttctagtctcttggtacaggaagatactccgcaggctactaaaggagaactatagataccaacgcagccacatacctttagtctaccttatgtcctgcctacaaaatatggtagggcaatggtgtcacagaacttgtaggagtagtcaaccaacatctgatttgacttaaggccactccacaggaagaaacccatccctaacactgctttggtaaccaaaaaccagggactagatagtccagatacctaatttgaaaccaaatactattggtctgaaaaaaataagtgaaataagtgatattctgctatactatagatcagagccttattcagtcatcatcagggatgcttcctccatggaacagaggcagatgggaacagaggcagagacccatggccagatactttgcagagagagtctaaatgggaggactccatcaaatcccactccacagagctcagggaatcccatggaaaaggaggcaaaatattctaagagccagaggggatggaggacaccaggagaataaggccccctgaatcaacgaagcaaggtggatgggcttatagagactgaagcaccaagcacagggtctatgctatatgagtctgcacaaggtcctcttgaggtaatatattgtttattatctaataaagcttgcaaccttttggactcaccaagataggggaggtaatggagtattttctctgaatttgtaaaatacaaacgggctagacattgttgatatacttattgcctatatatgttgtatatagttattgtacttattgtacatggttttcttacgttagctgtagccttcttttttgtataagacaaaaaagggggattgtggtgatatatagtttatgtctggatggcaaataaattgatattaaagtaacctttgatgattttttaaatgacaatataagatcatattttctgacctcgtgtaagaaaggttgtacctaagaggaaaccatggggaaagaatgacacatatgattatctaaaatgaaagaaaacatatgtgtactgccacactcaaataaacagtgcaaaagtgaaacctatactgggacatattttgaaggatgtttgtgaaaggattattgaacatctggaatctttaaataaaaattctaataagatattggcaagattattaattggagatttaccaaaagagaatcactacatggtctgcacatagacctatgaaaagacattcaactctgtaagaactagaaacagaccgtgtaacgcttagagctatgccatcagcaacagtcagaggtaggcctcatttaaggcagacagaataaaagttagcaatacctctgggcaactgtttaataaagatgatgttgtacaccctcttacatgcagtgattctgtttctagatgtaaattctgagtgaaagtctgacctgtatgcccaagaggtctttgaaagagtgtctgaggcaaatgttttctagaaacaacttaagtgctaccaaaggatagtggatacatttatgggtttatttgtacttaatggaatattattcagtagtaaaaatgaactgaatttgtgtctgtgtatggatatggaccacagaaataaaattaagagaagaaagaaatttgttaaaaactgtatctgttgtgacattattcatataccatataaaatgttctaaatcactgcacagtgattaggaatacatagtgatacagcatggtgtagagacattcatgaaatataacattccagacaatatctacttgcagtgaaaatgaatacagacatggaagtgtacatctgagcatccttcatgtttgtttagttactgaatagtgggcacttaaatattttttcttttaatatgtttcaggatgccagatggcccagtaagccccttctagaactagattgatagagttattcatcttaaagagtcttcactaaggagaaagttttggatattctgttttccatataagagagtgggctgcttgagcgtaaatcgattttcatttctccaatagactgtgaattctccattgcaagaattaagctgtatttatcattgcactcctctgctcactaatttatgatataagacaaatatagacagatagattacaaagatggactcttattatggactcttaggttataatataggcatttaaaatctcagatatccattattttggcttcaattattttggcaacaaggtatcactatcattttgatgttttctttcatctctatcaacattaattatgtttctctggcaggaaaatgtgatctgttactcctgaactactgctactgtcatgaagatttgcagtgatatattatttatgatttattaaagcttgactggggattcagaaaaccaaagtcagcctcatgctatagagatcaggcagtgatgatacatgccttaatcccagcatcccgaagccatgaggtgggtggaggtgcatacctttaatcatagactcaggataaagaggtagatagatccctgttagtccaaggccacccagatcttcacaagattgagtcagtctaaaagagaattatagctcgaacctttaatcccagcgctagaagggtataaaagacaggagcaaatagtatgaggcattcattctctagccacgttgaggagattacagtctgagacttgatgagagctcatggagacacgatcagcccattcagcctggggtagaggtaaggaactagtggccagctgctttgcttttctgatactcagcttgaagtttgaacccaatatcagtctctgggtcatttattaatttgtgttacaaagatttttccattccttagagcattgttgttttgtaaatgtaactgttctaactatttaaaagatagtctcctggccaaataattttggtaggcatagacttttaaaagtgaagatggttgactgaaccctaagcctactctcatgcgtactggtgagaaactaggtgttcttttcctaaaatagaaacaaaacatgatgcccccaacccctcttcgcaacacttttaactttgcattgaaaatactatcatcaattgcagtgagacagtgaaaggaaagaaaacatatgcatttggatagaagaagtaaaactgtcttgtactgcattgggcttgatggcctgtacagaaagttcacaattcaactacaagttcctggaaaaattgagcaaaagcagtaaggtcacagctaataaatccagttggcaaaaatgaactgttggcttatacacttattgctgtacgatctcatttcacaacttaaaatgccatttacaattatagtgggaacaaaaaaatcttagctataaatgtaacaaattatgtataaaatccatattcagaaaatagtggctctcatgaaagaaaaaaaaaggattgtgttctagatgataaagttgaaacaatgggagcaagggctagcatttttgtgctgttgttcattcatagactccttgatcaccttcgtcagtttcccctggtccctctttttaattagacatcagccgtcatctataaaaacagcagactttcagccccaattatttcatctgttgttctcactactctttaataattccagtcctttcaaagttttgtctaggagatatcagagttgtccaaagtattcgttgttggtccacacaacacttacagttagggtccctggctctaagcctgtgggttgatgacagtttggcttcagttagtgccaattagcacaccttggtgacctagtcacattgagtgctttctacctttcatagattcccacttgcctgactcttactagagtctcactattccctaattttctatttaaaattcacagtcaccttggcaggagttgtagttcaaacagttcagttgacactggactcttttccttactgcaatatgatttactgaacaaagctattgttgctgctgtaactccagcctggtttcatcactggcatatatgcagaggtaagcaaatggacaaccatgttttaaaccttgaactgttacattttcagtaaagctccatttgaatacatgattaacttaaaaaagaggacatgaagttgtgaagaagtgtgctgaggggtgtctaggggagttagtagaggagactgagagtggatacaaccaaaatatattgtattcatgtatagtgggaaattaccaatacggagtcaggtagaaatataagggtatttaatagggaaaagccttacttacagagcgacctagccagccagcatagcagcagcctgtacagtaagaagcaaagagaaaccgaaagcgcaaacgcagtcacactacgtcactctgaccacaccctcacaagcgtggtcaggcacacctgtagccagcccctaagtaggcgtggctacagcttcccctacattcatgtaaaaaattctcaaaggatatattgaaaagaaaagaaaagataaagaaaaggaaaaagaaaagaaaggaaatgaacccaccccaccaaaactaaccaacaaacccatgaaccaaaagaccctaatgttatagagatgaggagaccattcatgggagtccagtgagatcaactaaaggaaggagtgttatttctagcttgaacagacagatttcttgaaaggagattggggcagtcagatggagaatagggggtaaaggatttgactaacacttaagggatcagctagtaagggtagaggattccctctaagctgataggggtcttggggtcttgctaagaatgggaaatacaggccgaataaagatagacaatgatgtttaagtcagcagttacttgagaagaatgcatagaggagccagagtagtttagtccaaaaatttttttgttagaactaacccaagatgtcactatcaggagaaactgggtttgcaaaaatgggaactctactatccagttttctgtatctctactactagtctttaaaagttcttaatttcttttataaaagtcaaggtaggttttgtactgccagttcctaaagggatatgtcatactctgtagcccttctaagggtgcaggtttggagcggcatgaccctattatttctggctggcttctgattgcttcatcaaagttaactctggaacacccatgtcccaaataaaactaacccatgctgagatcacagacacaacaggcttttgagtcttctgtatttatgtcaagaactttgctcaaccatttaccttttcactcttttacattaagaaaggtgaaagattaagtagagccaaatgaataaaactaagataaaacagaaggtttcaataaagccttacatgaccagatgccattctaccccaaggaagtactttgtgagtgtccaaagtattggaagacacaacaaaggtctgcaaatgaaattctcacatctctgcaggagtgaatcccaaaggggagatgctgtgaagctgctagagagggtgaggccatggcctcattagaaaagtgatgagactttaagttcccatccttcatcccagcactacagtcagtggaagcaggctcagacactcctttccaagcagctggattgctcatgatcgatcaatccctgagctcccaccttctaaagatcctactagggctgcttagtaattatttccctggatgaagagctgccatatctgggttaataacatagctcatgcaaatctttattgttgtttttaccctctgccatgacttgtccaataatgacagaaattcagccattgaaacagttttaataggtgtctggcccaggagaaagaacagcagtagggaatctcgtaacaaattctgcctagatttagactaaataaacatgagatatttacagattactttccatgtcccaagtgcaacaaaattttgtccaactttacaacccatccataagttattctcatgcttagcacttggaagagagggggaaacctactaattaggcagctgcctctagaatcacagatttgcataatgtgtatttgattctgcacacaatagaggtcccactttcttgtgcaaaacaaaataaaggctaaacaatattagtctggtacaagttactaagtgtctgttatatagttatataaaagcattcctatcaatgcaagagtcttgagggaaaggagaactaaaaaaaaaaaaaaatcaatgtaggactagagagaccacttagctgtatttctcttacagaaggcccaaattcagtttccagcatgcactctgagtcacgcacaacattctgtaattccaactccagggaatatgacactctctcattttacacaggctactcaatgtgtggtgtgtgtgtgtgtatgtgtgtgtgtgtgtgtgttgcacaacacatatacacacacttaaaaataaaatcttaaccaattcaatgtagtgtattctttttgatatttagagggatttcaattattaaatgcatccactctctcacagactaagattatattaggtactgaaattgactctgggattgtacctagactaggtactgtgacttgcattggaaatctaaaaggaaacatatcctcagtttcagtagataggattgtgttagcaacagtctaaccaggcaggattgaaagatgtagcaggtgccattctaatctagatagcctcacagtgaagtggtttcatagtgttgcacacaaaattaatcagcatgcagaaaaggtccagctctgagaagataaacgacttaaagggatttgattactgctagggagtaattgggttcctgtaattaatgactaaagaataggaagaaaacaggacattattcaaagttgaagcttgagtctaggtaaagagggtcctgattggtaaggaaccagtgacttggagacatttttccgtcataggcatatgcagaaatgcttggattttttaagtcaaatagttaattgctaatagcaatgacacttggaagctgctcatgggagtagaaacaggtatagacattttgatcccttatgcttttgttcttctctcattttatcttagatacagtcctgtagggagacaccgtaaccacacctcctaaggagtggctacaggtgtgccccaccacgcccatcagggtgtggtctaggtgatgtcaggatgatgtgggagaggttttaaagggacagacaaggcacatgggagctcgctcttgccttgctgctttggcatgctctggcttgctgttggctggcatttatctattaaaagttatcctaacctgacggatttcacatcagttattcaccacattacagtccaactaggttttattcatcttttctaagttttttgagattataatataattataccattcctccttccctttcctccctccaagccctcccacataccctttcttgccttctttcaaagtcatggcctctttgttcattaattgttattacctgcatatatgcatatgtatatacatagattcctatatacagcatgcttggtctgtatgttacttgtatgaatgttttgagtgcaaactatttgggattggatagtcaattggtatgcttttccttagggaagaacatttctctcacaatcagcattccttagtgcaccagctgtatttgctacacttgttcacttgtgcttgtcacacaagtaacactgtgcaaactgaggagcttatatttaggaatatatatatatacatatacatgatgtaattatagtgtaatctcaaaactctaagtaaaaatatacttcaaacattctttgcttgctagctttggctgtccttcctccactaactcaactctttccttacagtctcgtccactgagtcttgctcattttcttgatttgcccaagttcaaaatagagaattggttaaataatcaatagttcttaatggaaatgtgtgtgtgtgtgtgtgtgtgtgtgtgtgtgtgtgtgtgtgtgtgtgtacttagttatctctctttccctattagtaggtcaactccaacttaaaaattgtaatcttaaccaccatgacactggttttcttttgtggctgatggtcatatctgcctgggatattgagaagactgaatggtaatgatgaacaccgaccgagccctcagcacagcattgcctgtactccataattagccatgcttgaaggtcactcacataccagcaggcagccatgtttgaacagcctggagtactgtacagagacctgttctgtcaaataatgactaatctccatagggcttgatgtgtggttttcttaagtagccggtgtatttgacagctctaaaagactgcattgtaaccacatctgtattagcctttgggctagagataagataaaaagcagtaaaagcttgttctgccaagccatcgtcaacaagcaggtggctttggaagctcatagtgcttgaaagaacaaaaaattctaatctgaggtctggccttggggactagacacttgtcatagcaagcttttaaaaattgattgcaatgtttttcacaacttgattgattaaataagtgcactccagtggaaccagttacaccctgagacatttatacaagggagacagacaatatatttgttttttgttgctgtcattttgttgataattttctttgtttcattgaacctccatgttctgacactcttgagttttccaacttagagtcattttcatttatttaattattttctcaggctgcatttccagcagggttctgacatgtccttctgtgcactcatctctgaaacctacataaataaatagcatcttggcagctcaaaccttactatttagctaactctctgtgatcttaaacattcagaagaatagtctcccaccaagtcagctggcctaaagaactgtcaggtgtcttctttgggaacaaattaatggagacttagtcagtgtgattggactaattgttcagggatgtttgctaacaaaacttggatgagggcaccagaggctcccagggatgctgaaaaagtggcgactctagcaattatttcagactgttgtgtttcttaagcatcatttacctccatacgctgtttctatcagaggtaattctgaccttcattcagggctcagagtcaatactccttttcttgattctttaatgagttactccatttgaccataaatatacaccttgtgtattcctctcatctttgtacaatgattattgccactttcctaccctaggtgtccacaaaagaagagacaatgtctgtaaactttcatacaaaattcaaactacttatctaataccccatggcattaaaaatttgtgaccggttaacaattggtcaagacactgctatttaaagtggcaaagaactgttgtattttttgagatttttctttagcagttttcttcggtttgtttgttttttgttttatcttactctatttaattttttcattttattttattaattttatttaaattagaaacaagattgttttacatgtcaatcccaattccctctccctcccttcctctcctgcctccccctcccccccccccgcaattaacaccctacctgtcccataccctttctgctccccagggagggtgaggccttccatggggggggtcttcagagtctttcatatcctttgggatagggcctaggcccacccccacgagtctaggctgagagagtatccctctatgtggaatgggctcccaaagtctatgctagcgataagtgctgatctactacaagaggccccacagatttctgaggcctcctcactgacacccacgttcatggggtctgaatcagtcccatgctggtatcctggctatcagtctggggtccatgagctcccccttgttcaaatcagctgtttctgtgggtttcaccagcctggtcttgacccctgtgctcatcactcatccctctctgcaactggattccagttcagttcactgtttagctgtgggtgtctgcttctacttccatcagctgctggatgaaggctctaggatggcatataagttagtcatcaatctcattatcaggggagggcattttaaagtagctttcaaggatcatttctacagtttgttaattattgttgtatttgtatatggctgtttgtattctattgagagagagagagagagagagagagagagagagagagagagagagagagaggtgtagatttcagtgggtgaaaaaagtggatgatttgcaggagtaaggggagggaaaaccataaccagaatatactctatgaaaaaaaaaacatttatcttaaaaaaattaaattgtttcaaaccatcaaaaaagtgacagaggaaaaaaattatcagtaaggaagagtgtggactcatgtatgtagtaggttgtgcagtatgagagggctacccactggagaaaataaagacattgaacaattaacacatgctgcttagaaatcacaactctaacttccatggttagatccttgacagttctcacaggaattactggatgcttttaatgcagtgcaaagcaggtaatctgctgtcactcggcttctgaatgctgatttaagtagattgacatcaaaacccatattttgtctgggctttaatcaggtatcaaatacaataaaaggcaactgagagaaatggtgccaagtgatttcttcaagtgttttaggtaaagaaacttccagaacttatcctttccacattgtttgctgtctctcagaaaacattttctccattgctgttttgtggacttttatattctttcctcattgggttctttcgttgtgctccatcacatacactcagagctataattctctcttcttcttcttatttttctatttatttacttaatttagaagcaatcatagtttacatatcaatcccagttcactctcccttccatcctcccatgccccccacctggccgccacataccacaccccacccacgccccatggagcgtgaggccttcaatgggggatcatcaaagtctgttacatcacttggagctgacctaggccctctcccgtgtatctaggctaagagtatccctccatagggaatgggctcccaaagaccatttgtgcactatggataaataattgttccactgtcagaggtcccatcgactgcccagtcctcctaactgacacccacattcagagggcttggttctgtccaatgctgttccccagctttatgactaggatccatgtgttctcacttggtcaggtcagctgtttctgtgggtttctccagcatggtcttgactctttgctcatcccttctctctctctccaactggattccaggagtttggctcagtgcttagctgtgggtctctgcttctgcttccatcagctactgggtgaaggctctaggatggcatttaaggtagtcatcaatctcattataggggaagggcatttaagatagcctctccaactattgcttagattcttagggagggtcatccttgtggatctttggacatttccctagtgccaattttctctttaaacctataatggctccctgtatgggaaatccaaaccattcctgcttggggctggagacaagtgcccaagtgggcgtggtcaggaacacctgtttccagccccaagccggcacggttaggatttcccctacagctcccactattaaggtaatctcttttcttgctctcctctaatataaaaaattctctcttctttttgtgaaatctaaaactcattccttccttaccccaggcttccaatccaaaagtttctgtatttgttatccagttgcagaacacagaaaattagagaactttgaatacaactgaaatcttttccagaaaagtttcagcaatactgagctacatgctctttttcacccttcaagttcaagacaagactttctactcaagggcatctctcggttctcataagttatgtacagtgaattaaggcatttgtgactgtcaatatactgctcctgattttgtcaactggagccccacaaaagcaacttaatctctcttccacacagttgctgatgtttggcaaatgagatcttcctttaaccttcttcaggatttaaatttctagggtctctagatggctaaacagaaagttgtttgcacctgaacagctgtatatttagttgcactttaaagcttttattagcatatattaattacacatggtaatgtgcttcattataacattttcctatatacattttatgcattttgatcacatttactcccattatcatctattgtccctctcccactaacctactgatctcctgcctcttattaattagttcctcttctactctcaccttctcctcctcctttttcttttctttacttttttttctagtgaatcaatgagtttaattagcattacttacagagcaccaatgagggattatttaatgaagtacaggcaatttaccagtggccacagcagaaaagaaactagttctcccttcctcctcacacccattaactgcctatgagttttcagagatgggtgggtatcttgtgttcccctccttgaccgtgatggaattttgatagactcatcttgtgtaggggttttgcagatcatcacagtttcttaggactcaagggcacaatagctgtgtcctaactggaagagagtgttcagtaacactccatcctttctttcaactctttcatttgttctgtttcctcttccaaaaggttcagaagcttggaggggttgaatagatatctcctactgtcatcattttgacaaattaaaattctctacattagctaacttcaaaaatgaaattttctggccaaccctgatagcatccatcactaatttataggcatgagcattaatattaagaaggtaatccaagaagcaaatcgttcagcaaggcaccaccagtagcttctccactaagaaccatgacttctttagccatgagcatttgaccaggtttgcagtagaattgcaatgttagattagtgacattaagagaatactagaactcatcaatggagggaaagggactttataaaacttgtccacttgccacggtaatggtgatcctgactatcccataccagagcaacctagaaccatcactgtggctttgccttagaaaaaacataatattttctacctgctgcattagctcttcataatactagaaagaaataggtacctgagatttattcattaataatgaagatttttaaaaagaatgcatttagatgttattatggggcaaacagatgcatcattgagtaatcacatggctggatgtttctatttgctctattaggttggcttgtcagcatcctctgtcctaatgtgcagtttccaaggaagctgccctccacaaactgcaacaacaggtttttctttgggtttttatttttactattaagacattgatgatctatgaatctgttagtaagggtaggacattaattcttctgtagtcttctgccaggtctctcagtcctggtagtaaccctttactaaacattatagctttctctctttctggagtgctgtaacagttacctctccagctccacaaaggttctcaccatttcttaccctggggcactattccatctctcttgaatttctgttagccttgttcaacctcttgaagtagtctctttattaaattgccctctgtttcttccttgactatgctatctgtcttctgtctgggccctcaatgacacagcaattcatcagaattatagatttttttcagaggctgatgataactttcatgagctatagctactgcacacatcctttagaatggacacagctctaccaacatttgttatagagtaattcagatatcccagattttctctgctccacagtcatctgtcagcttggtcccccctcatgaggtcttagtgtgttattggttttaattgtcatgaaaacatgaacactggatttatctgttaacagccaattttaaggtgttcatcaagctaatccttattctttcttctattgaaatgaaggaaaaaatatgtgcctatacttgcagaccctgtaaatgaagatagctgtctctgacaattcttatatgcctggtttaagaaaaccagggacagtgaataaatgtttgagatctgaaaacttgacaattgcctgatatcaacttgattacttttaacactatgtcattaaccaactattaaatatttctgaatttcaacttattgttcaaagtataaggcactagcatgtacttcatagattgattaaataagatacttcattaagtatttatgcattctgtcatctagaaagcatagtatagatatgtatttaaaagaagaaacacattgccatgagaaatatagatactgttcttcagttgccttatcaataaaaagtaaagacttagacaaagacatagatgtcaggctaagagattgtttactaatttaaggaatttttacattattattatttttgtgtgtgtatgcatgcacatgtgcatgtgctgtgtgtgtgagcaaatgtctgcatgagcagaagaggacatacaattacacagaaattgaattatagccagctatacctcacagcttctgccccatttcctgtggatgatctgagccagtcattgatctgggggtgatagaaaggaatccttagtcatacaataaaaagtatgtgttctctggatgagccttgcctcagtatttctcaccactcagagattgtggtgaagttttcctagatgcactgcaatttaggtttcatacaccctgttttctctcctttcccctttccttgaggtcaggttagcaccatagtttgaagcctacccgagccttcccttgtgtttctttccatcttttaaaaatgcatttctgtcttagttaggatttctgttgctgtgaagggacaccatgatcacagcaactcttctaaggaaagcatttaattggggtggcttgcttatagtttcagatgttcagtacataatcatcatggtggggagcatagcatcgcacaggcagacatggcgctagagaagtagctgagaatcatacatcttgcaggcaacaggaagttgactgagacactgggtaatatcttaagcataggaaacctcagagccagtccccacaatgacacacttcctctaacaaggccatacccactccaaaaaaagccacacttcctaatatagcccactccttatgattatggaggccaattacattcaaactatcaaaatttcccacaaagaaaattctttcatctcaatcttctcttgttacctgtttctaggatgattaatattttacagctatagaaagcaaaagttatgtctcttttttttctatgcccctaaggccatgtctctttatatctctctactttgtatctaatttgaagaaaatcattgacaattattatggtagataacttgaaatagtgttaagagtcagttaaactctaaagtgtgtgccaaactttcttacatgaacttaatgtgtcttcaagagtgtattatgactttgctcttagacaataatttgaattatgttaaaattacccaaatagttcagggaaaaaagtatgcaatcctttcagttgaattgctaaactttcttcacaagtaactcttaaatcacttgtataaagcttttaaaactttaaagtaaggtgagctttgttaaattatgtaatcagtacttaaagcaatgtaacatattttgaagtcacaattttttaaaagatattttaaatacgacttattctgagtctacttgaaaaggaatggagttatgttaacaaacaaaatttcactcctgaacattgaattgtcatatttgaaagaggtgtatttcagtactactaaatatgcagggctaaaaatgaagacaaacttttaacttttgtaaccacaatgcctgactatctcctccagcatcccaaagatgaggtacatgttctttttagctagaaaataaggttgcatacacattcttccttcctagagccacaagacagttgtctactaaaatgctctgttggacccaggttccaacttcatttttctcacaggtcatgtttcttatgtaagaaagccattgacaaggaaagttccaagtcatgctcaaactgacagccctagatgggaaatagctggcaaagtaataaattccactcaagtcagaggaaaggtttctcaaagtcatagttttggcagagatgtcatggcactgaagattgttcttttagtaaaagataacacatttctccctcaactttcctgccttttatatccatttttagccatataaaatagaggagattttcacacacctatgcaagatctctatgccagatgtgagttttcccaaataactgttgatatcaagtaagagacttatgatgacacaatgagtccagacaatatacaatagccgactctccatccttcaaattgcttcttgacaggtatctcatatctcatgtgctaagctttgtaagtcttcttttgggataaaacactgagggatggaccttaccatccaaggtggctagatacttgtttccatgttcacacatatgttggtatttattgaatgaaattttctaacaccctcatcaccagtgatctcaaccttaagctgagcttgggttttcattggacatccattgctatgttccttctcgacatctttgtacccttcacactgaacctctgaggtcagacttttaagtactttattacaggctacaatacaaaacaaaatgattttaataaaaaatcacagagatcccccaaaatatcaggtgggaagaaataacaagacagaaattaatgaaatgtagacaaagaaaatgatttatgtagaatcagtcaaacaaaatgttagttttgaaaaattaagattgaaaaacttctatcagaactaactaaatgagagaaagatgccaattattaaaatgaaaaatgagagacagttataagggattcttatgaaatctacaagattatgaagtactttgaaagtatattccaaaaaattagaaaaatcaagaaaatgaatagattcataagttcaaaagagctatgaaaatcaagtcaagaagacataagaaaatttaagagattcacaacaagaaataagatgggagcaattaaaaattatactaacaaagaaaagcccaggtctggatgcatttactgttgaattctatcaaaccaccaatactaataaagcaaagtacatattttattatttcatccaatagatatagaacacacattcttctcatgtaatccttactcacaagacatgataagcccaaaagcagttcttaacaaatatggaaaaaataaaaatcatttcttgtatcttaccagatcatattggactaaaactagaactcaatagaaactacacaagtaattggaggctgaataagggatactcagtcacgtagttattagaataataaaggagggaatttcaaaagcacctagaattaaaaatgaaaatgaaagtacaatttaccagaatccagtcacagctaaagcagttctaatataatatttatagttataaatactcatattaaaacaatcagagaagggggctggagagataatcagtgattagcagcagcacttactggtcttgctgagaaccaaggttcagtttctagctcccacattaggtgtctcaaacccttgtaaatgcagcatttccatcccctcttctgcaattttcctttacttacaatgtgggagttgagctacaactgtatcaattgggttttggaacccagagtcacttattgtctgcattttgaccaataatggagctctgtaatagtcctcatctgttgcaacagaagtttatttgatgaagagtgaatactatagtaatctgtgggcatgagaatatttatttagaatatagttagaaattgtgttagattagcaaaatggcaatagtagattttcatctagggtctatgacaactctaatctctggtaaatggctagttttatggtatcaagcatgaatctcctcttattgaatgaaccataaattcaaagacacaattgttggttacccatatatgtaagtgccactattgcatccttggatataccttactttgataatcactgttgtgattcatagactttacaactggtaggacctaattgccttttctcgataggcagcctgcacagcaccttcagacactatgagagctagtccttagggagatgcttccaggtcagttctaactcagctcctctgaattttgtgtcagaagtgcatagtatcttcagcaataagatctcaacttcaagttctggaggataactacagacaatggcaatagtccaaattgtttgggagactcttatctgtatgaattgtatattagaaaaacaagtcatccagtcaataaacaagctaattaattgaagagactgttctcaaaagaaaaatacaaatggtcaataaaaatgtgttaaattgctcaatgtctctagccatgatagaagatacaaattaaaactgcactgagattccagctctccctgctcaaaacatctatcatcaggaaaacaaataaggctggagaagtgagttggtgtttaagagaatggactgttcttgtggaagacacaagtttggtacccaggacccaaagagctcacaacaaactacaacacacacacacacacacacacacacacacacacacacacacacacacacacacacacacacacacactctttaaaaattaaaaaaaatcacagcaaatgctggcgaggatgtgggaagtgaagagttcttgggtactaaatggttagaactgaaaacacacatacaagtaacattatacagaccaccaaggtgtgaaatgatgtgattatattataatctcaaaaataaaagaaattaaaactgaaaggaaagaacaaaaagaagaatctttcttttaaaacctgctggtatgggagtaaactagtgtataccctgtggaagtcagtgtggaggttcctcataaaacagattcttgagcttccggatgatcctgtcatactgtaaccatcatggctggagctgagtaaatcaggatgggcattctgcttcctgaggctatagactgttgaaatgatagtttggatggagttgggatcactctaggactctcaaacttggggaggggggaagttaaatgctggagcaagctccaggagaaactttttccccagaaatataatttacacagcttttaagactaccttagaggagtgattgcatccaggactattatatgtcactgtagcggtcttgcagtgaacttgtaagggtgaccacactccttgggcatggcctcaggcaaatggaagtggaaagaggaagcctgaggcatggctttccttggcatgctctttctggtggctcagaggatctgatccagtaggaagggcagagaaactctcttgtggttcttttatttttctgtatgtgttcccctataagcacctatttatcattttatattgggtctagtgaagtcattacatcctcaccttcatgtcactgataggtaggactacattatgatgaagacttcttagttatgcatacctcttgccctctttttaaacctttctcttctatccgtatccctgttaaacttgaggtcactgaacatctggttttgctttcttaccatccaatatggccaaactaatgattatcatttctctgtcttttattattacttgtcaccttagctgtcatatggataacaaatgtgaatcaagtttgttagggctgttaaagcccagactttgaccctaaaatctccagtaacagtgctattcctggatattatacttacaggactctaagtcaacatattacagagacatttatttattaatgtttattactgactaaccatcagcagatgaagagattaaaaatgtagtatttatacatagtggaaatcttcagctataaagaaaacatgaatttacaggaatatagattgaagtcagggaccatctgttaagtgaaataggccacgtttgatggtaaatattgcatgttttctcttatatgtagactttaaattgtgtgtgtgtgtgtgtgtgtgtgtgtgtgtgtgtgtgtgtgtgtgtgtatgcttgctgagaggataaaggggaccattggaagataggaagagaaatttggaggaagggtaagagagtgatggaatacatgtggtatagaagcagaaggaagggctataaaaaggggagaagggcaccagaaagagagaggaattggagaccagggaaaagaataagcaaatgtaacataaaattccagatattcatgaaaagtgctataaaaatacctctcattttctataatgacctaaacaactaataaaaatcaaaccatacaaggacaattcattaaattacaaaaattatttttaaagtgataattaaaacaacaacctcttattttcaaatgaaatgataaaaacacatcacagacttgctatgtgttgtgcgtggcagggtgaataggtcctctctcatttccctgaatttagttctttaactaattaatttgaatgattttctggaatacatttctgctttcccctaaatccaatttagattctgttttcagtcttagcagtcatattttcctacatttctctgagctgtgtttgtcacagctgttatcaacttcattccatctgctttccctcttttaatgtttctgtcacgctatacattgtctagaactatataattctatatgtatccatttacataattgtatatgaatagatggttatgcatatatacccttcttctaacttctgaggattctatgcaaaggagactattggagcaggagttcagtgtctcatcctgattgactgtagacctggttttcacatttaaacacttggaggcatatagagtatgctataatttctgtggtcaatttgacaacatttttttctgcttctctttccccacaccttggggactaaaagggagacattattcccagtgtgaagcttagaagtcaccaggcacatgaccatcagagatgagagaggagcatgaacgatctcataaatctgttttctgaagtagtggcttcccatgttcctcctgattgaatactgactctatttattacttttcttgtctgtgtgatataagccctgaaaaaaatcaacttaaggaaggaagtgtttatttttggttatagttcatggtaacactctgttatttcagagaagtcatggttgcatgaaatttaggcagctggttacattgcacacacagttgggaagcatagagggttaatactaatgcttaaggcaacgtctatcttttattgagtcaaggactagagcccattgaatacagccactcacacttagggtgtgtcttctaaacataactaatctaattgagatggtccctcacagatattctcagagacctgtctcctaggtaactctagatcctgtcaagttgataaaccatcactctggtgatgacttccatgagtctggttaccagccatcctaacagttttgtaattattcaatgcctatctctgttttcctggaaaaataaaaccttgatattgcaaatgttcaacaacttgtctgtggctctatttttaccaggatctgaattgatttgtatcagggtcctctacttttattctattctgactacccacctgggatgtgttacattttaaaatggtgaataggctgttgtatctttatatgtaggaggatgtggctttacacacacacacacacacacacacacacacacacacacacacacacacacgaatgataattcacataactttgatctttttaggttaatttagaggaatctaggataaattaaattatatgactaatgaggaaaaagaaacaaacatattaaaaaattgaatgatttttgttagtttttataactgtgggttaaatgaggaaagggaaggaaggaaatgcactggggaaatgcttctgtaggtaaagtgcctactgtacaagcatcaatacctgagtgccaatctttagcccctatataaaaatctggacactttggtactcacctgtgaacccaatactgtggagctagagacagcagggtccctggggcttgcttcctgaattagtgagcaatgttctccccagatcatgcaggggccagtgagaagacacgaatgtcaacctgtattaacctcttcatgtgtgaacacatacatatacataaacacagagacatctgctactctctcctacccacacagacagacagaaatataaaaaagagaaaacaagaaatcatggtttagggtgctatcccttatgcatgtcactacagcaccccagctttatttgtatatgagttgttttgaagtattcaattgtcatcatttccatattagtcagtcagaggtgactgactgatgaaaggcctttacttagactggggaagaatgtgcaacaaattataccattgttactgtcagtaaaaacttgacatcattttatcaaagctaacaattatatttagaagcttgtcattcattcactgcattgttgacatttcactagatctcaatgttaacttcttgtaaacaagctctgtaacaatattttatgtctactcaacatgtttttaaaaatcatagaaagcagaaaagcaacagctggcttaacaacaaagcaattgacttaattacaaaattaatgcctaaggtatgctttaaaatatgtatttcagggaaaaaatctagagattggagttgtgttgctatgggaacaagctatagaaagacattaaaaagaaaattaatttatttgcttgtttcttttgtacagctttactgtgtttgtaaatggtcaaatgttatatatttgacaaaaatggcacttacaaaatgattattctagtatttatcatcatcttgaaaacatattctatatatatatatatatatatatatatataacagcttattagattcatagcccaaataagttatctagtaaactgtattacattatattcttctaaattgttgaaatgagttgaaaacttcagttttctatatcaatggcctatcttttatttagtccattctcatggaccatcgcacctgtgtgacacacaacagaaaaaaaattactggaaatttaaaagtaaatcatatttttaagtgcatttgaatattgacaaggaagcaagtgattatttagttgaaatagtttctgacaacttgacacaagctaccatttgtgaagaaagattgtcaattgagaaaatgccttcatcagactggcctatgacaaagcctgtggtacattttcttgattgatgtttgatgtggaaacatcactgtgggttgttctatcccacagtcaggtagtcctagagttcttgccttgagttcctgcttggatttacccggatgatgataaagtgtgacttgagagttataaacaaatactttccttcccacattgcttttgaccgtagggtatttcatcatagcaatggcaaaccacatcaaagttgttctcacctcaaggaattttctaatgtaaattttaatctagatagcttcaaaatgtgaaggagcagaaatcaaatccccaagacatatgcatctaagaggcaactctgctgtgattagcctggtgtgcacaaatagatacacacagtaagagagatttggaaaagagacttctgtatagcttgaaatcataaagcttgtgttgcagtagagtaactcacagggtagcttttgaaaatgtgtggtcacaggcttacccttgaataggatattagacataaactgcctgataattttagaaatccttatactacaaatttagtttgctgtggtgtccaactgatgatgattcctgatggaaacacattgccaaacatctctggagtaacatatcttcttacattgacttttagcactactgaaaggaaactaaacacacccctgagtaaagcattcgtgagcaccaccagaaataacaagcttgcaaattcacaacactcaatgttaaatcaatgagtcattcatcacaaaacacatttcttcaccaaaacttccttaagggaaaaggaagcaataaaaatgacttaatggatttccaacagccaactagaactgccattcgttaaaattatgttaactgaaatggaatcacgaagagtatatttaacaatgttagacataaactaagaaatataaactgtaagatggatgagtaaaaattataagaagtttggcagagagagatgaaatgataaggttgctgaagaggttaagatgtataaaatctaaaataagaattaacttttattgaggcttaaggtgacaaagcaaagaaatggttttatttgtatgtttttgcacttaaatttgtagtacatttacatagtatgtttatttaacatgtatggacccttgtaaagaaacaaaaactgtgtaaactatacatatatttctaggaaggtggtattactattttcctaaaatttaaagtgtaacatattgggattaaattgcaatgttgacaaatttaaacaaagctaaagctatgtttgatatgttgatttgacaaatggacatcccttaataaagtacaacttctgcatttaatgttcctaacactaaattacaattattaatttaaacatacacacacacagaggaatgatttccttcatgagataaaatgaactgacatctaattcatcctaatattcaggaagtaactctaaactacctgaaaatttttcattagtcttttttaactctgcagagatgggtgatataagacaaaccattttactactttcttcctccaaacctcttaatctattatagattttgctattagctagtttttaacctcagaggattagtcaatcaatatttacaatcagtatttctccctagattttctcttgtcctttgttatgtttcccccacctcaatgtttaggctactaagtatctaactattgtcaaccttggttagattgcatttttagaacctcattaaaatagagtcatacatcatgtgtttttttttctgacattacagtctgcataattatttgaggcttatctgtatcattactaataaacaatttatttttttattactgggcaatatgctgaattgatataccacagtttgctactatttcacctttaggaagatatttcaaatctgtccaaaattttaaatcaacaacatgttcacaaacatgtatttgtatgaacagatgcttcatttattttgagtaaatgccaaggagtaaaaatgccaagatgtaaagtgtccattatcacatggaagatttatacttgattctaaaatagctgccaagctgttttccatttctttatattttatattgcttccagctatgtatcaagtttctagtaaatctgcttctttgacagcactgtatatatgcttaatctttcaattttattcatatttataaacttgtgttatttgtttcaattttaattcccctaataattaatgatagctcttcatattacatatgcatgcattttcactggtgatgtgacatgtctactcaaataacttgcatgaattcttgagacagcactttgcaatataagtcatggttgtctctaactcatgctcctcctgtaccagcactgtggtcagggattacagccatgcataaaaagccttggcatcaacttttccattcctgttggattattttcataaaattttgaaatatgtataattttgatatgtattaaaatttgatatatacatgtattactgatacacacttactcatcctaatcatgtaatatacaactatttttagtagaaatattcaagaaaaaagttgctggagcactcctgaaatgattgaaaagctaaactgcttgttcaaataggataaataaaaatcttattataatgaaactgcaggacaaaagcaaagagatatcttaaacttatccagagaataaaggcagttgacttcaaaagagtgggaatccctcaagaacaacagcagaaggcagagagcacagctaggagcagcaggacataaatgccacctggtgcctgattctcattcctccttgcattccatgtcttccatcagagaattcatttcctctaattaatgtgagtgtgttattttccctgctgatgaggagatgaacagtttgttttgttttgtaaagggggggtcttaatgttttaaatattgaaatatatttgttccaagttttagaactgtacctatttatacccagccattgtatttggagtgtcttctgactttaaaatattctttgagaatttcgcctatgtatgcaatatattatcctgtccatttcctatttcttccctccaactccctctggatcttccccaatgtgtctttctcataatttcatatcgtttttaaaattctatcaatgtctaagtagaactgtcctatatgggcatccatgtgggggcatctactggatcacaggcacaatctcagagaagaataattatcccttttctggccatcattaactgtcaataactcatcagctaggggcggggccttgtggactgattcccaatccatactagaatgctgagtgccttgatcttgtgcaggtcttgggtaggtaaccaggctgcagctgctgttaggtcatgggtgcagcagccagatcaggcctcgaagacagtattttagaattccccatatcttctggaaaatctgccgtcctctgaatttattggtcttttcaaatctttatttgggatatctgatcagttttggaaccccctctctgattgtttcttcacgtgatgcttcaggccccctttctctttccttacattttgagaacccgattgagcgtcctctagacatcaacactcagccctctggctcttaaacttgctcctgcagattctgagcttctctctctctctctctctctctctctctctctctctctctctctctctatctctctctctgtctctctgtctccgtctgtctgtctctcaaatgtgttttatttttattgaaatagattcctctttcatgtaatacatcctgaccacagtctccctttcctccacacctccccagatgccaggttcacttgtctccatattcatcaatttttctcttaaactctatccattcggctctcagtaatgccactgagtttacttactgtgttcaaaaattttcaccccagttgccttgtttctcatcctattaagttccattttctgcttttgtacatgcatattttcatgtgtctttatctctgcaactgtttgagcatagttgaagtacaatctgtccctcttattgtaatatcaaatgctcttgtggaactgctgatggttgtcaggcaagcagggtttctctggacccttcagctttattttgctccttgcttttgaaaacatttgtttgttattttactcagaagcattgcattcagattctctccttcagaatgtgcaaatcagcctggcaactggcctgtggtcatttccatttttgtaattttcctgcagcttgctttgaactgtgatgtgctagtcagggtacagcacacatttagctctggatgtctttgcacatgtttggtcctctggggatgtgtcttactgtgaggagactttttttctggtctccctaccaccagaaacctcttgcttttgacatgcttttttatgaccaaagtgatcacatcaggaatttcttttatcagtagaagaaaatgctaccgaaatagaagtggtttcagtgtgcacttattcttgggacttcatgttctcttatggcttgcactaattccaaactatctttccttactgtctatacttttgaaggattatttttaaacacgtgtttttgttgaagttttaattatttaatggagatcagtttgatcatttgtcttactatgcttttcaaacataacttcttttatttaaaaaaaatacgtgtatgtgtctatgccagtgtatattcacatgcgggtatggattcacatagaggctagaagagggtattggatcccttggaactagagttacaggtaattgtgagacacccaatacatgaccaaaactcatgtctttatagctgaacagcaagtgcttgcaattgatcaacagcctggtgacttctttgtatatttgttgctttgagggtattttggggcacattccattattcataagacaacttcaactgcttcgcatgctttcaccatataaacacttcaatactctctccacctacccctgcccgcctgctccatgttcttccctattttcctttgtgttcatgcttgtaaactgtgttatacatgagctctaaaatccacacatgagagaaaacatacagtgtttgcctttctgggtttggtttactttattaatattatgatctctagttgaacccatatcctagcaaagtcagaatttcttctttaaggctgaatagaaaggactccactgtgtgtatatatggcattttcttttctattcatctgtcgacagacaccatacaaggtttgtttcctgctattgtgaatagtgttacaagaaacatggatacgcatgaatctctctggtgtgttgaacaacacttcttacccttattttttctatgacagtagtaacaaagaaatttacccatttacagctgcatcgttttattgacattcatctatttttttcagattagactcataaccatgataaactagagtagtaggctatttttaatagtaagaattggatctttgttcattcttttgggagagtttttcttttgcttccatttaacagatatgtctggaatctaaccactggaaatgtgaacacaaagtccaagcgggttagcataggaattaacacattcctctttagttgggttattagtctatcaagaacatttttatttgaaacaaattaatttttaatgatggacattaccagaaataggtatcaatttacaatatggtttgtagtaaggaatttcttctcctaaggaagaaaagttgtgacacatgagcctttcctcttactcagatttctacttttacttaagcaacagttcagttgcttttaaatcaaagaatctggatttctttccacacaggtcaacacattatgtgactcttgctggtttttaaaccatagaagagccaggtcagaattacagcagtttctggctgtatgaatctctacttcagctataggctcattactactcatcactttctgattctaatgctttcattcagacaataactgtagatgtttaacatggtcagggaaagatcagtagaatttttaaaacttcactagctgtatcgtagattttatgaattgtaattctggaaacagagccctcaggtagagaatgtgtgtgtgtgtgtgtgtgtgtgtgtgtgtgtgtgtgtgtgtgtgtgtgtgtgtgtgttatgtgtttggtggtggtgatggcatgtgagtgtatgtgtgtacttatttccatttcttttattaagttattttaggttccaattacttcacctattctttaacattcataatgaactaggaagtagacttctgtatcaaatttcactgataagaaagttgactcttaaagaacttaagtgagttgctcaagcaagaaagaaggagggctcagatctaatctgttttcaagttctggaccttggatggagagatggctgttcttccataggtcctgagtttaattcctaacaaccacataataattacataaaactttttaaaatgcatgaagttggggcactttcccagcccaaaagaagtgagctgttgatgtatcaggaaggactacaataaggggaggaattatatgccagataattagttgtagtttcatcaaaacaatatggtaagcatattggaagagactaatgtactttactaaaatgatacatgttctcatctgcatgcttagtaaagctctcctttaaaaacaagtatgctgggtggtggtggtgcacagctttaatcccagaactccagaggcagtggcaagcagatctccatgagtttgaggccagcctgttgtacagagtgatttccaggacagccagggctacacagagaaaccctgtctttaaaaaaacaaaaaccacagtcatccaaccaaccaaagaacaaataaacatatattcaaggcatgactaaacttaaagtcagggcctgtgagccacttaatgtatttcaaacttctaacttgagtaatttttatacaacctgcttaacttttagccatacttccactaatgcaaattactgtaggcacagtaaaaatattgaaccttaaaactcctgtgttggttttttcctctgttccctttgctgggaacaccctgaacaccctccacttctgttcttaatttaaagttgttcaagtgccaacttagccagggaatcttctatgtttatgtggatacaatttcctgaacctcaattctctgatggtaccatgtttttacttcaattaaccttcagctcactgacttaaatcatttctttatgtgtttatattccctactggactatagttcttgaagctaagtgtgtttttcattcctgcatacccagtgcctggcactgcataaaaatgtctaagttgattagttaaaaatatcagacttgcacacatgagccagtcctgtttggggattacagttctaaaataccaaatgtcttttgtctatactactcccctgttccccactcgacacttccatgtcattcttggagactcagagaagagacaggtcctatcctgtaggggaagctgtagccacgccttcttaggggctggctacaagagtacctgagggtttgtgagggcgtggtcagagtgagtagggggactgcgtttttggtttcggtttctctttgtttcttgctgtacagactaccaccggctggctggttcgctctgtaagtaaggcttttccctattaaatacccttatatttctacctgactccgtattggtaatttcttactatatctggtgtcagaagcgggatattggaaacccacaccccatttgggacaggctgtgggttccatcgggcccgccgcctaggcccggaaagcacccactctccacaggcgttcccggctagcagccgacccactgctgctgagctgctcagaaccatccacccagctcagagacagtttctagctgcctagagtccaggtaggcctccgctttcagctgtggcttcccctggcctgcgggaaagcccgaatctgtttcagtggttgtagccccaaggccgtatactctctaagatatccttgggggaaggggaattaacaaaaatagttgacagtagtatagaacagaaaaggttaatgtatattctcctttgattgggttcagaccattcagtaaagtagttgccctgtatttctgcctttttttcttttttcatctctctgactccaaaagtgcacacatacacacacacacacacacacacacagagagagagagagagagagagagagagagagagagagagagacagacacacagagacacacagagacacatagagacacagacatacacatctgctactaagtggctactaaagattgcacacatggatacggacactgaattcttgggaaaaattattcacagcctttaatctatgtcttcatggaacaatggtaaattctctgggctactgatatcaaagtggatctgttaacctgggactctataagcaacaacaaattcaattcttactatgccacacacttcatgtatactcatgttatatttaattctttctctctcacacaatgcacaacaaaccccagatattggcagaagacttctagaaaaacattgaagagaaacaggacactggcactctctttgttgcattcttggaaattgtatttaaagtcatgactcctatatccaaatctatgggtcctcagtccttgcaaactacttagcaacctttcatctgcctctaagtcagagaactctttccacactgctgggaacagagttatcatctttttcaaatgtagttggtatttcctgtaatagtcagcttcctttctggccaatttcttccaattagtcctcagcagatctcccagttaattcagagttctatcattcttcttactgcattcttgaactttagcctttagaatatttatgccagtgtaattggttacaacatgcatgtggctatttgaacaggaagttcttccctttattatatcagaagagacacagatttgtttgagacaaagactgtaaataggcaggcaagaaccagaagcatcttttgtttctctcacacagtaattgcatatggttttcaaaatcagcaatgcctgggcatactgttcattttctaatttacctttcctctactgtttccaatgtgtggtctatttcattcatttatattatcttcctgtctttttaggccaactgtaaacactaaggtcttcaatggcaaatatgtctgtagtagacataataatgtcccctaaagttgttcacatcctaatcccagaacttgtaaacatgtcacctcctctggtataaaggtctcagtccatgtgattatgtacaggattttgaaatggaacattatcttgtattattgaggcagctctatgtaagcactgggtcctttagagaaagagagaagagggtctaagaaaaaattataataacaaagctgggtgtcagtgatgggctttgaagatggaggaaggagtcaagcatgacagatggcctgcagaaagtgaaaaagattcagaagtagttctctcctaaatcccacaggcttgatgcatacttgacagccagcattgggcattagctcttaagattcacctcaggctactgagtgtactactatagcataataaatttgcagcaagctgctaattttgtgataatttgttgcaatagcattaggcaatatacacattatggaagggatttttttcaaaagcaaattaacccttgctaacccattatttttaccacatggttttagtggccatattgatgcaggtttagtcacgagatactgattcattatagtaagatttgatatatgggaattggtgtctctttcctaagaatgtatgacagtgttttatcctttaatggcttgtgtatattatagctcataaactaaagcccagtaaagtaatagcttccatgtgtttcagactattatacatcaagcactcttccacatagttgccaggcagaaattggccaaggtaaactgtttccttccttcgtttaggtcgttgccatcaccatgttgctgttgtcctccacacccgtcctaactatacccataggcccatagttacttcattccatttttcccttatttttttttctctgcttgtatagcttgttctcccttcccccagtgtttttaatcaggatgcgtaaagcaaaagcacagattttggtagtaatgactgagatgggggcacagaagcacccgaggaacagttttaaaagcttccctttgcatttacactatagtatatatatatatagtatatatatagtatatatatatatagtatatatatagtatatatatactcacaataaacaaacatggcatgtcttactttccaggtactgaaaaagaaggactctctgtactgaccaggccttgatttcttttaactgccacctgcaaatggaacttgagttgacatatgccagtgaaaccatgagacaacagaaacatatacaatgtgggttttcttccatatttgcagatcagcaaccataaacctggatttcaaaggagatattactaacatatgccatccctggagaatctccaagctgaccaggtgtaatggctaaaaaggagacatgaaataggagtgtaggatgaaacacctgttgccgtgactcctgttgttattggctgctatagagtttaatttgagacagtcaacagagggagataaaactgggtcattgcccacagccaggtatttaaagaatgcagaaaacagcctgcatgaattcagatgaacatttatcattttgtttcactgtgtcaaattatgtgaaattatcttggattcttacatagcagcaattcaggaaaatgccacctttcctttttgttttatattctacacacctagtctaaacaaacactggaatgttatacaagtatcacaattgaaaacctcagacaagtcaggttcctatgcattactttagctagccaaatatttcagtatcttcaaagatgtgattgccttaggcaactcatatacaagatacacaattccctactcttccagataactgctatgctatttaagtttcccatctatgacatacagaatgggactttctaatctctctttctatctgtgtttgtctgtatctctgtatctgtctgtatctctctctcttgtgtgtgtgtgtgtgtgtgtgtgtgtgtgtgtgagagagagagagagagagagagagacagacagacagacagacagacagacagacagacagacagagagtacttagatggcaaaagagcctttgattgtgtcataaagttggtgatttttgacataaattatcaggaactgtaaggatgtgaccaaggtaattgtgagaattctcagaagtgaaagggattttttaaaagtaggttatagtgaaataattaaggcaacaactaaaagaatgaagaagtgacatatagattggaaaaatattgaaatatatatagttatggtttgattattatttgtcatccataaaggactctgtgttagatacatggaccccagaaggtagtgcagcactatttcaaatagtcaagatatggaatcaacttacatgtctatcaatggattagtaaggaagatatgatacatatatacaatagaatactatacatccttacagaagacaagatgtcctttctcacatgaactgaagtatagaatagtctgtcatgaaagcactatgtcagaagcatagacagacatgtttgtgtcttttctcaatgatacaattggttgaataacaatgaagtcataatctactttagttttgttgactttggttttccaagtagtcctgatttcccctaatagcatgccaaggacaaacataaattcctttattctgatcctgactattaatatcaattctcaggacacgcattacacatcacaaaataaatatatctatatatagaatggctgaaaaggtttccaagaagccaggaagagtttaaagagttatgaagatgaacaggaccaggcagggtgctgatagagacacaaagataatgtctgtgggaagcactggtgcagaactaaactgaaaggacagagttgtgctaagcctctggtcaaactgaactactagggaactgtggaactgtctataacaggaagtgcaggagaagagtggattgttgcaggacatttgatcacaccgtgaaccccaaacttgtgttatttactggaaaaacctgtttctagttgtgatatggctcagccctagcacacatctttagttcaagagctttctgctcaaatattgtaaacagaatattgtaaaccagaatattgtaaagaggtagatcaagcaaccagttgatgggaagtgaatataggattattcagagaaaaacagagagtaagaggaagtcaggaggatggatagagagatgcacaggaagtaggagggagggacatacagtttgatgtaacatgaaaaatagaacacccagagacagatattaggtttcaagcttcaagaaaagaaaagcagccagccactagctcttagttctacctcagacttaatgggcaatcctaaaactgctcccaccttcactgctcttcagatccactcagactgctatgctttccacaacatggctaaagcctaactctcagactgattacctctatcttttacctctatcaaattacctctatcaaatcctagaattaaaggattctcttgttggtagcccagggtgttcctggattcagagatccttgtgcctttctcttgagtcctgggattaaaggtgtgtgccaccaccacctgatctctgtagcttgaggttatctttgttttctgaatcctcaggcaagctttaataaatcataaataatatatcaccacagtttgaggagtatttttgcgatgatgtagggaaggtgggaggcttctgagatgttggtgaaggaagaaggtcagctgggtgctttctctgtgtctctgagataataggcattcactccagcatctggattctggatctttattggtaaaatcaaattaacaagatttagaaacagcaacagtggatgactagtaaagatggatgaatgcaatttaattaggccacattggccctagtgatagagcttagctgaaacccctggggccattgggagttctctgcctatcagccctttgttgcacacactgaatagttagaacaaagactggtggaggcctttgccattgttgttttaggtgttcttctcttcatagggtcagatgaggacatagcacctttccttgtctagcacatttgatacattctgaggcctgctttcctgttataattttagtatggccatccacaggggtgcagtttactttcatggacttatagggtagtaaactctcaactttgaggaataacccacttattagtctgggtttcatggtttgtaccagaaagttggtgctgtgtggtgatatattgtttatggatgtttccattttttagaatttggaaaattaaaatatgtacaccacatcattgatacctattcaggttgataatgggcaactgcttgagtttggcaaagggtgatttggtaattacacatttgctagaagttatggccatcatgggtatacctgcacaaatagagacagacaatgctccagcttatgtttctaagaaaatgtaaggattttttgattattataatataatgcatattacatgtataccatacaatcctacagggcagacagttatagaaaactcaaatagaactctaaagggtgtgctaaataagcagaaatagttgataaagaaccccccaagtagattgcatagggttttattaactttgtattttctgaatgctaatgagaaaggaacaatatctgtggagagacattggataatagaaaaaaattatagaattaaatcagtgggaaaaaagtatgtattgacctcttagtggaaaccaggacatgtgttatgttggggaagaggttttgctattgtttccataggtgaagaaaacctatggataccatcaaaattgataaaagtttaacttgaacaagacacctctcctcccaagtggtgggattaaaggtgtgtattaccaccacctggcttctttagctaactagtatggctgttttgcattttgttctgtagtggctttaataaatcataaataatatatcaccacaatttcccttttttgtctaatgcaaaaggaaaattatgactaacataagaaaaactatatacaataagtacaataaatatatacaggaaataattactttaacaatgtctagttcatttgtacgtgataaattcagagaaaatattccattatctaccctatattagtgaattcaaagtcttgtacctaatttactttctaatcaaatttgcattatcaaattatcttttaatatctttcaaaccttttacacattacatattgttagtgcatttcttttttgagtctggtaaacaattaaaactataactatgctaactagtcttcaacttcctcagagacctgacaaggaaataatattagctgagtaagcaggaaatgatgtattttaacatgataaataaataaataaataacagagacagatatttgggttcaagcttcaacctgaagatcagaaaagcaaagcagttcagactgaaaggcaatcctggctccaccaaacctcagactgctgcttctcctcagcttggctggagaatcctgagactttaatgtcttcccatcctcaatgtagctggagaataatgcctgatactgactattgaagaccctgctcctattttttatacccctctagtgctggtattaaaggcatgtaatcccaggtgctgagatcatctttgtgtgagctgcttccatttaggagtggatcaatcttgtgtagatctgggtggccttagactcacagagatccatctacctcttaatcccaagtcctaggattaaaggtgtgtaccaccacctaccttttagcttctggctgctgggattaaaggtgtgtatcactattgcctgatctctatagcttgaggctggctttgctttctgaatcctcaggaaagctttaataaatcaatactggatcctcaccagaactcctctaggataccctgtggctgccatgagttatggagatcgtgtgggtactgttccacagtatcagtcccttcactagctctaacaggtcctagatggggtagatgctagggtgggtcaacccagagcttggctgtgggcctggatggtatccctagggtcacccacctcaggcaagtggctagagtcagtttctctacatgcatgccttcagggccattcatcctggcctgtgttgggggtagggaccatctctccagtatgtaggggccagctctccagttgtaatgtccagtgaggggcaagaccagctttcctagggccattgaaaatcataactggctcagtatggtcctctgatttaatcttgcatagtttctagggctccctgaggtgacacaagccacaaacatccacacagacccctgatgtagctggaccatgggcccagacatggccatttgcagcagcttgggcccggtagacatcctggctctgggtagagagactttccaatcaggtgggagtggttgtggccctatacttgggtctctatgtgaccttttgtggcaatgcagaacctgaacttcagcacagactccagctgtggcagaaccatggacactgacatggtccttagcagtggctaggtctgtcaccactgccccagaagtagtatggtcctaattcaccagaatgtcccttgatctctggtgtctgcatttccttagatggaaccaggtgcatgggacatcagcacagaccctgactgcagtatggacatggaccctaacttgaccctcagctgcagctctggcctcaatgccattaggacattgagtagcagcacaggacactcagatctggatgcatcttgaccctcagacaccaacctagactcagatggctggtctgaccctgggcatcctcatggcacttgttggcaacaagagatgaagtcactttctaaaagtaaaaataaagtgaactagggaatgtttaaaaaaaactaaaatcaatgatgaaaatacatcatatcatgactaaagtagagactgtgtgagagtactaaatttcaaagctcattgatctgcattctattgtaatggtgtgataagttatgcctcagtagagcagattttttattttaaaaaaggaagcaggaagtaaggaataatggccctaaatgactgttcagttgtgaggactaagtttcaaatttaagtaattagactattaattcctggtcatgtatcctgtcttcatttgagtggacattacaagactagatcaagttcttgtcatctgacataagcttgaagaattgcttagctttcctcagcctcaggttcttcatttgttaatcaagggagtactaataaattatctttaatgtttttacatgtctattttatctccattgaatgaaaatttacatgaaatcccattattaaagaaataaatgaaaatgatgaaaagaagattgcttccttagttgacttgttagaaagctggatttagctctcccaagttgagtttattaggtatctcttctgacaaggccagcagcaatcactttaagaagcttgagtctacatgctcccaaagtctctataataacatgagcagaataagtctacacatgatgacctagaagtaacacagcgtaggaagtcaaaaagaaaaacacagtattgatttatatagtataaacctggagagacaaagggtatagggcacattttctttatttcatttgtatttccaatgtttacttttggaagactttgcctgcttgatacctactcccttcccagaatttctctcagagctgaactagtattagccaggtgaaaatctctagtgtgaagattgaaaaggagaagccaataacagaagctaatatgagaccaatcatgggccagttcttacttcacaggagaatatagacttgcttaatgtcattttctttacttgattcatatttttttcttaatggtataaaattcagacaactggtctacctcatgactgacctaaaataattcagcgatactaacttgcatttattttgtcacttggcagagaaaccacaatgaaattgaaagttatttgggaaattatcatggaataccatctgtatcacatccatcctacccatttggccccaaattgtttctaaaggaaatgtcataaaactacccttgaggaatctaacaggaaagtaagatttaaacaccatgtttccaaggtaacttgggtttctggaataatgagtagttttagaaaactgttgaagtaaaaataattctttttctttttcaaatagttctcaataatattttcattctcttactatttatgaacaataagaggtcatgatttaatgtgacgaacaattttaacatgggtgggcattgggataagagtgaattagtggaaacccttttcaagaatttgaaaataaagtgtataggtgggtatgtgagagaagttaagattcgacatgagacaataaactagatcagaaagtgacttgaaagctatgcaaagtattttaggccataacttcagtgatggggagccattaaacaattctaagaatggagtgatcagatgtgaaaggtaaattcccaaacaataaacattatctaatgtgaaagggggtatgactagtagaaaactaatgcttgtaaaagcattatatgagtcattcagttgagatatgattatgagacaaatgaattggtaatagaaacagaagagctagtctagacagattcggtagtagaatttaaagaagcagatgggaaaggcatgagaaaaggattctaggataagttcctgtctgagaaactagatgcccagtcgaagaaaccaaaagtataaatggaagacgggctttcattaaggatacagaattctggttcagacaggctaagtttattatatataaacaaacaaaaactaaaacaagtcactaagacactaagattctggtgctcacaagtaagccatcaattgctacaggctttgaattcaccaaccgaagagtttacatgatcgggtgtaggtgagctggtcttgtttctagaagatcttaatattaggtaaaaaaatgaacagtgatcttttatgcatttgggatgtaggaaaatgcaattctacagaggaatgatgagatagagtattgttttacagtgagctaagatgtttaaagaaagaactttgtcaaaggcatacttgataaacctttgagcatttcctaaaaaattgttttttcttcttttttcagtttttcttttatttgaaaatagtttctttgcttatacactgtatcctgattatagtttctcctccctcaattcctcccaattcctgcccatctacactcccctctggatccatttcccttctggctctcattaataatgaacaggcttctaggagataacaaccaaactggacaaaataaaaacatagcaacccaattggaagaaaagagtcccaagagtaggcatgagagtcagaggcccatcctgacagtcaggagtcctataaaaatactaagctaaaagcaataatgtatatgcagagaacttgctgcagacacctgtaggccctgtatttgctcttcagtctctgtgaactcatatgtgccttgcttagttgattcagagggcctggttcacctggtgtccttcaatcactctggcttttacaacctttctgcctcctcttctatgggattctctgaatgctgaggagagggatttgatggagacctcccatttagaccatctcttcataatatctagctgtgggtcttcgcatatgttcccatcttctgtggaagcaagtctctctgattatgcctagtcaagatactcaactgtgagtatagcataatataattaggagtcattttattaatcttttttacgacctgccatgttttgtttacactaggattctaggctaccgaatctctgtcttttagttacctaatcaatatctggcatgggttccctatcacagagcaggatttaagccaaatattggttggctactcccacaagttctgtgccaccatttccctagcatactttgcaggcagaacaaatttttggtcaaaggttttatggtttgcttgatgtccacgtttatctttcagtagccagattttattttatacctgtcagtgtatctaagatcagtaacacaagtgacagctcatgctagcaaaaatgtagagcaaggggaacatgcttccattgctgatgggtgtgcaaccttatacagtcactatggaaatcaatacagcagtatatcagaaaattgggaatcaacctacctcaagatccagttataccactcttgggcatatacccaaaggatgctatatcctaccacaaagacacttgattatccatgtttattgtaggtttatttataatagccagaaacttgaaacaatgtagatgtccctcaaaagaagaatggataaagaaaatttacatttatacgatggagtaatactcagctgttaaaaaaatgacaacttgagatttttaggcaaatggatggaattagaaaaaaaaatcatccttattgaggtaacccagactcagaaagattaatatggtaagtgaatattgtaagtgaatattagctgttaagaaaataatacccaagttgcagtctgtagacccaaagaggttaggtaaagaggaggggtttgggtggaatgcagggatttatctgggagggagaaacagaatagattttatgagtggactgtggaaggtggggacaggaacaggagggatcagtttgggggaagatagggtggagggagggagtgtggggagaggctgctagaattagtgggtatttgggggattattcttttaattaatttttatgaaaattaaaaacaattttattttacataccagtcccagttccctctccctcctatccttccattccccccactatctgtccatcccacactcatccacgcctcagggagggtgagacctcccatggggatcatcaaagtttatcaaatcatttgaggcaggaccaaggccctccccctctctctaggctgagagagtatccctccctagtgaatgggctccaaaagcccattcatgcactagggacaaatattggttccattatcagtagccccatagactgcccaagcacttcaactctctacaactgattccaggagtttggctcaatgcttagctgtggatctctgcttctgcttccattagctattagatgaaggctctaggatggcatttaaggtagtcatcaatctcattataggggaagggttttaaggtagcctctccattattgcttagattctaatttggggtcatccttgtggattcccgggtatttccctagttgtaatagtctgaacttggaaggaacctagatgcccctcaactgaagaatagataaagaaaatctggtacaattacacagtggattactactcagttgtaaaaaaaaaacagtatctccaattcttaggcaaatggatggaactagaaaaaaacatgctgagcgaggtaacccaaacacggaaagacaaacataggatgtattcactaataagtggatattagacatagatcaagggattaccagcctacaatccacaaccccagagaagcagggaacaaggcccgagagtaggggaaagagacaaaatctcctgaataaattgggagcatgggggagggtggagggaggtagaagaattatgagggagaagggaaggggaggagaacatgagggtttgggaaggtggggttgggggaacagaaggagagcaaggaaagagataccttgatagagggagctgttaagggcttaaggagaaacctggccttagggatactgggaggagtatatgaaaacctagtaccatggaaacttcctggaatgaaggtgatcctaatgaggactccagtaacgcaggatactgagtctcaacaggccatctcttacagccaagcaaggcttccagtcataccactggggtgtattcaatagagctgttggctaaagtctccaagcaacctaggctgttgctactactaagtgttgctctctgcaaactgacagttgcaccccattgctgagaacaacacctacataactcactgaacacggagagattgtttttgtaacaagccaaagctcaacgatgtaaaagaggtgcctgatgattagcaggtgatttctgaaggaagaccaagtgaaattctactttgtacctaaagatgctcagtcaggattatattagtgttttcatttagaagagcacaacgtttaacgactcgaagtaattctacacaggagaattaaaatgctactctgaaaactatctaggtttatgtttaattaaacaagaaaacagtgtaattggaaactttcatttcaatgaatctgctccacttatttccattgtattagaaaaatattcattataaatcattctgagagtcaaattatttactcttgatttttgtatttgcaacaaaaagctgtcaggaaaggatgtggtgaagtttaaaaatgtattattttaactgaagtgctaggtcatatataagtagccagcaaccttgtgatagtttatgttcattagaattcagtgagagtgccccaagatttaatcagctgtatgtgtcgtctacatagttggagaaaagtaactgtaaagccaatgctagcctctgaaaatgaatgccgatccttggaaccttctgtagcatcactaccattctttcagtgacctgggttggtaatttttctttaagacttttttttttttgcttggcacatatatattttgtacaaattcttgtcacaaattctgtttatgataagaatttgggataagaatctgtgaagaattggggagggggaaacatgatcaaaactatttcatcattttttttttcagtagcaaaagacacaaaaggaaaataagacgataatgaagaatatccttctactctgaaaaaagttgcctttaactattgttttccttgcttaatagcttaacaatgtgaaccctttgcatcttccttaggtgtgccaccctttcttttccagctgtggctctcttgctaattttagtgtgttggacgagagcttggaagcttaatagatgtgaggactaggaagagcaatgctgagctttgagtagatgctagccctgcacagaggatggaaagagggctgcttatggtgtcaagaaatcaagcagaagttcttacactcctttcctctactgatcaccacacccttcaggaggcatctccacagctgaagccagagctcactgctagacagcttactccactgatcacctatctttgtttcctgtgttctgggagtacaggggctccaagcctgcctaattttcacaaggctggacgtgggaactctggtcctcaccactgtatggcaaggtgggtgattcaccagaaagtcactctctgacccaggcccatagtcaatggctgctgagagagagcaaatctgttgcattcaaggaggaactcccgtataggtttcctagtacagagtgggcctccctgaatacttgcatatatgtgctaagctagtgggttcctaggttatacatatatctgtatgcatgtaacaataattttacccagagatgatgaatttgaaaggggagaggaatgagaggcaaggaggagggagaaataggagtgacaaggacacagagctcatgtatgagattttaaaaatataaacccaaactattaaaacagtcaaacaaataatcaacagcaggtgtcctttctgactagaaagacctgtatttgactccttccctttctttatccaccttcccctccccacctcttctcttccctctccttccctcccttctcttccccttccttctctttcctccttttctcttcctttttccttaagcatattttgactatttctatacctgtttcaaagaaaacgctgattttcctcatgctaaagcacttctgtcttgtctctatcccacttttcatcatgctcttgtgttattttctccatgtaggctcaaagtggtgaattgggagggaccctaggatcagcaccaagaaccacaggcatttatatccactctgccagtaagcagctgtaggtgagtcagggctctgggcctgctggtttcttcatctgcggaaatccataaacatgtcttcatgctctattaaaaggtctttctatttttctcattcatgtctcagcatctgttgcatattcactactatatcctgcctacaaagaacattttaaaattgcttcagctaatatattcaagaagtagatgttgcagtttgacattataagcttataaaactggaaatcatctttgaattaaaattaccatgccacatacacattttcttaaccgcacactcaaaacgcattatttttcaaaccctctcagtgacttggtgctcattcttttctattccaattctattatctctaagaaaaatattccagaaatttaattatagtacattttattaaatacaaattcaaattcaaatatatttataatttatgaattttattggctcctctgtctcaatgcactgtaacagtcactagtgtcactagtgagatctatggtccatgatggttcatttgattttccaaatttgtatacccattgccattaatatatttcaactcccttccccaaacagcacctgtgtcaagtgggatcgtgtcttttaagtagtcattctgtcttagctcctgtgaccaagtaactaagaggaggcaatgtaagtgttcattctgtctcacagtttgaggggacatagtccatcatgttggcaagagtgtaaagtgcctgtttgaaccacatccacagtcaggaaccatagagacaaatgtggatattcaatttgattttcttctttttttatccagtctcaattctagcctgtggaatcgtactgcctatatttagggtggctcttcctgtatcaactaacctagtttagaggtttgtttgcagacatgcccagagatgtgtttctatggtgactttaaatcccatcaagttgacagtcatgattgagtatatgcatgccattctcaatgaaatgataatataattcaccacaaaaagaatggtgtcctaaagcacaggcatgcttttcagttgagattgaatattgaaattgaaagaaaacttgctgtattgtcatggttacttcagtaagtttttctttttgacaccaactcttttctctccgataaagaagctgcattcacagttattggttaaggacccatgtgcatgatcccccttctaagggcgagctttaatggtttgcagtgtcaaaaatctgcttcagactgcacagcctgagaaaagatgctccatgtgaattatctacacagttgaagtaagatttagtcatttggggctttggaagggagttttgctgtttgtcttcctttacactcagggagggctccgccagtgataagactggacagtggctcctaaatccaatacttcttcatctgtattatctctatgagataaatgatttaaatataaaataaaggctttgtgtagcagggggcttgacaccagaggtcagcaaacaaccacccacaagcttgacctgcatgtgttttgtaagaagctggaggcacagctatgttgatgcctattgccatggctgctttttggcaatgctagctttcaatactggtaaaaacgcattatacagtccataaagcttaaaatattcactctctatcttttctgaaaaaaaacttcaaactctgtttaacagatttataaatctttgcactcattatttattttatctttaacttcagaacacacttaatttaggtgtgaaaatatgatccttgctgtgtagtctctctcttgcagtcaaatactcctgtggggaggagaggagaaaatacactggaaatttccagagtagcattcataaggttaattctatgctgttgtttacagctgtgtgtgtgtgtgtgtgtgtgtgtgtgtgtgtgtgtgtgtgtgtgtgtgcgcgcacgcgcgggtgtgagcgggtgcacgctttgtgcatgcaggtgcccacagaggccagaaaagcgcattgaagctgaagttgcatgtggttatgagcctcccaaaatgggttctgggaatcgaactgttgtgctctacaaaaacagtacagtctctgaactgctgagtcacctcttctgccccatttgtggcttttcatgtgttctaaacagaaaggtgaattctatagagtttgaatacattaccttggattcatttcttttatttgacacctgatttaaaacaatttcatggagaattttagaagcagtgcagagaggatttgtgtatcctccatgtatttgtctagtagctccatctcacacaattacagggcaatgtaaacccaagaattgacatgcatacaatatatgtgctttctttcctcgtgctgtttatttacagatacagattcatgctgccactaccacccaaacacagaactggtccatcaccataaggactccctgtgcttcttgcttccctgtaacagatcctcctgcccctgcccttgactgccctcttccaatcactgatatccatctctataactttgctattttgagaatgttacacaaatgaaaccattaccatttttgattctcattctatataacactccagggagccaccccagttgtatatgtaaatagttaattctttcccatagtggagtaataatctacggtattgtttgcaccagtttaactattgtttaacattcaagaaattattctttaactcattaatggacattttgggtggttttggttttttgttttgtgttacaaaaatctggtatgaataaccaattgtaatctttgaaatgccaaatttataactgctgagttactaatggtgtgtggttgcatgtatatgcatgtgtgttacaaattctattttataaactggctttcccattaaacattagtatcagcaatatttgagagttctgattttctcaaattcttaacagtgcttgattttataatttacaaaagttgaatggtctttgggagcccattccctatggagggatattattgcatcccaaatacatgaaagagggcctaggccctcccccaaatgatgtgacagactttgatgatgccctgtggagggcctcactatccttggggagtggatgagggggtgggttcggggggtggggggcatgggacaatgagaggaagagggattggggtgattgagatgtaaaatgagattatttctaaaattcattaaagaaaaaaagttgattgtttaggatcatgatgatataattgttattcgcctagcataactcaacttactggacattttaaataattatttttctttcatatatttgctttatgtctttagcccatttttatcttttctgtatcatgccagttttggtacatgtgttgctgaagtgagtacatttagctaattttgaaatgatattttactcttgaattttgagagtcatttgtatgttataaatatgaatgcaaacactatggggatatgcatataaaattagcccacaatgacttaataaagtgaacaaaacagcttaaaacctttgttggaaatgtcacatatcctaaagaaataaaactgaacctacatatgtttttcttgatgtgagctgtgatctttggtgtttggttagatgtcatgtaagagttcatccctagtagggcagttttataaggaagatatagccatgctgttcctatgtccctaccccaccatttcttatgcggtccttattcttagggtctaaggtacctagccattaagctctttgttgtcctctagcctggggagtagtagtacagtaaaacacaagagttatcttctctttaaaatgacttttcaagatcccatacaaggtgggacacaacactttctacttacatatcacaaccaaggcctgactaatcaaattaatataatttcaaagtgcgcccagtaaatgtcatcttttaactgagtacaaaactgctctaaaataaaattaaggttcaacaattgagtaatggctgagaatggaagaaggcaactagcaattcctgccattttcattttaatataaatttccatttcttttctctgatgtaagaaaatttcttctcctaaaaagcctttctccccatcaaactactctttgaaatagagttatatcatttctcccctctgtgtttcctgctgagtccctaccagctatcctcccactagcccacctggtgttgataaccttaagttgatagcctctttttctttgaattttattgctgcagattgttatatatacataaatacatgaatataatctgttggatcagtttttgttgttgtgtgtatctataaactgtagagtttcagaacaatgtgctcactcttaatctttgtgggattatgagaagacatgaattctttggagtcttcctgttacacatttctcaagaagaataacatgcatagcaaagcattgttggagcagtaacatgcatagcaaagactgggggagcctcagaatgcataggaaggcagattaatcaggatatcccccctttaaagaggaaggaaagactggatgaagttactgaatccttcaacttagagacagcaattgtagaattcaaaggaactttaggaatcaagtaaaacaatcaaaccatcccaagtcatgctgttgtatatgttcccagccagtttgtcttctctagtcctaattttgaggtattcttgctcatgtatagaggtcccttggtctttagtcatattcagttgagggaacataaatgtataacttttctcctcattcccgttgtttaattttcttttatgttattctgattgcctccacctctgccctcgtcccttctgttcgttctgctgaagatagaactttactgatgcttttgtgcttctgtgacctgataaatttattcaacctaaaatattattattattaacattattatttacaccctatactgggtggtgggtttttgtgtgtgtgtgtgtgtttccttgacacaagctagagtcatcagaggaaggagtcccagatgaagacatgcctccatgagacccagcattttctcaattagtaatcagtgtgggaggatccagtacgtgttgggtggtaccaaccctgagctgctggtcctgagttcactaagaaggtggattgagcaagccatggggaacaagccagtacatagttcacctccaggttctctgcatcagctcctgcctctgtgatccttccctgtttgagttcctcttctgacttccttcagtgttgaacaacaatgctgaagtgtcagccaaatataccctttcctccccaacttgctttttggtcatggtgtttcatcgaagtaatagaaaccctaactaagacacatcctgaccacagttttctctcatctcctcccaggcctcccatctcctccctgactcccccatccattccttcagaagagtgttggccttccatggatatcaaccaaatatgacctatcaatgtgcagtaagactaggcaccttctctcctattaaggctgaaaaaggcaactcagtgtgaggaacaagggtccaaaaagcagacaaaagagttggagacagcactggctcccactgttaagagtcccacaagattttatttacttattttatgcatatgagtactctatttgcatatatgtctacatactagaaaaaggcatcagatctatgcaccatgtggttccctggaattgaactcagggcctctggaaaagtagctagtgctcttaatctctgagccatcacttttggaacctattctctatagtgtaatacctctctcagtgtttatgcagtgggtggggggaggaacttggtactgccttaacttgatatgtcatgctttgttgactcccatgggaggccttacgctttctgaatggagacagaggaggagtagatgtggggagggggttagaagggaatgaggagggaacagcaggagaggatggagaggaaactgtggctaatatgtaaaaaaaatttaaaatataataatttttaaggagtcttacaggaatatcaagctgcacagcaagctgcagagggcctaggtcagtcccatgcaggctccctagttgtcagttcagtctttgtgggcccctatgacctcaggttatttgattctgtaggatttcttgtggtatccttgatccttctggctcctctagtcctctcccaccccctgaaagattacctgaattctgactactgtttagctgtgggtctctacatgtgtcatttgctgtcagttgctggaagaagcatctctgatgacaattgtgctaggcaacaatccttagggatttaggaattatttcattgcctttttttggtcagtcatgtttggttctatcctaggtttctgggctatccaacctctgggtcctcaccctttaggcactgttagggcactgttttctttttcttttcagagaaagagagagggggagaaaggggagagaaaaaggggaaagggagagaggggggagagagagaatgtcagaagacgccagagaagtgtgtcagcagtgtgttagagtttgtgttataggcattcgtgagactcctagcttttcccatgcttgttggggtctgagtcctcatgattgagcagtaaacactctgaactgttaaatccactctccattccttaacagatagtactttctgaaaccaagcatgactatttcaagtgctttatttggtggcactattatggttgagataaattttttggtaacttaaacccttttccattttgactgtatttgtaaacacagctttgtgatgtgagtcagggctgccaattcagtattaaatttgtattcgttgtatgtgttctcacagttcaaactttttaccaatagcactataacatcatttttcaaatgctgtacttttttgtaggctgattatttaactaatattttcatagcataattataaatcagaatgctaaatgactattcttgtcttatgagaaatggcattattttgtctattaaatagttctgtgctttctcaggcacattaagccctgaaaaataatggacatataatgccaatggaaacacatgtgtgagttaaatgttcagagtgataaccaggattctaaatgtgccatatttctgaggacctctaggagagtgaccccattctagtggggattggaatatgtctgagataaaagaagatttgacactgctttataagtgccatgcactaactgattgcaagacttttctactttatgtcttgctgtgtgaacctatctgctttattagggctgatgtagaaacatggttaggggcttccttacaagagcatggttaacttaccaatggcttcatactaagaaaatgcctctggtttcccatcattaactataaatcctcacagaggggtgtgagcgtcctgagtcacatcacgtgacagaatgttggtgggcacaatcttatgcaggtcttacagaactcatgctttttgtttggattttaaagagtgttgttgggtagaaggcataaaatatccattgccatacatgcacaaacctttggcattcacagcttgttggtgcacatgttaatactgaagaacatttattttcattctaaacccctggtgttttctcttggtgttgtggatgttttagttttgataagtgcaaattgacaggtatctgttgtgggataatctttttgtgcattgtgaagatgtgtctctgtttaacctcacatgcctaaggcactatatttctgattggcttaatagagagctgaaggaccaatagctaggcaggagagggtaagtgggactcccaaggagagaaagaaacttgggggaagaatcagagaggtgggaattctccagtgagacttggggaagtcagacctacagtatggaggagaggtaataagtcatgtggcagaacatagattagtataaatgagtttgatttaaggtataagagctagttgggaggaagactaagcttaggccaagatttcataattaataataatgtcaccttgttttattcaggagcttgtagttcaagaaaagtccaactacacttggcattcaatatgggacatccatcatcaggttacatgctcagaatgtctgacagacttctctgtagagcagaaaggactggcctactttgtcttggcaaagtttggaagttgacttcctttgtgtcctgattgtccaatttggacagcaatcaaggcaagggaagtttcttgcacaaatgacttgctttgacccattgaaaacactgcacatcgaggtttttcagtgtctatccatcttctttgaagtatattggtgctgccaggagcagacacatctcacagtcataataagccttatgatataaaacaccataaataacatattatgtaggtctcaaaagtgtttgaagaccacctaactatctaaaatatatctctgtttgaccttgaaaacatacctaacatgatgacatgttcgattgctatagatgactaactattaacctgtgttttgtaatcatcctagtttgttataatagctttcaaggactagaagtttacattatacttctaaatgagttgcataggtacaatactgtaagcatgagtagaaacatgtatgcaatatgttacaagaaatataaccttataattgtatcaatgtacaaaaatatcctccaccttaaataatatctgggctctgcctgttctttcttccatccaggctaaactccagcaatgaatgcccttttcactttttatattttctaaaatgtttcatggcctttaagacatgctttcctttagaaatataacatgcatatgcttccttcttgcttttgtatctcatttctttttattgatgagtactagtcaattgtttggctatataataatgtatttatttatttatctgataatagaatcttgattgattccaagcttttgcaattattaatacagatttcttcaaagttgtgtgtacactttggatgaacatgtggttgacaaattttgtgggaaatatagctgttggatgttgtgctaacagcacatgtgtagtattctaagaaaatgctaaaatgtcttttgaagtgaatctacaacttacagcaattatgaagtccatcttggccataaacttgactggatctggactcaaatgaagtctgctgggcattactaaaaaaacaaataagcaatcaaacaaacaaaaaaacaggaaaagaaaagaaaattttacaagccaccatgctgccattcctcatttactatactgattcactcactgagctccttgcttcatttcttgggaagacactcatgtgacagacttggggaaagagaacttgatactgatagagtaaatagaaagcaaaggataaagaataacagtaatgatgtcttgagaataactaaacaaccagaaatcagtcaagtgggcttcttctcacatgaattccaaagccaaatctacctgaagccagctgtacattggggaaaggtaaagagagagaaacaagagaaaattcaagaaaccacacataggggtgatggggaatgtccttctgtatgctgtgaatatatgtttctcttattgcttgatgaataaagctgttttggctaatagacaggcaggatttatccaggtaggaaatccaaagagggatagagtaaggtaatagcaagagtcagagagatgctatgtagctgccaaggaagcaagaggcccaggtattacctgcaagccaatactatttggagatactcagattaatagaaatgggttaaaattaagagagagatagccaatactaagcccaacaataggtcaaacagtttataattactataagcctctatgtgtttatttgggactcaatggctatggcactgaatgggacagaaacttccatctacagagaggaactaagagtataacttagtccatttttattgctattgcagaatatttgattcctagtagtatatgaaacaaaggcatttatttagctcacagttctggaggtaatagagtatagtaccaccatgggtttctagtaaggggtcatggtaaatgaaatgaaattgaaaaatgataatgattggtgaatagctacctggcaacaggaaaaggagactgaagagaagacaggctcactcttttatagtaagccactgcttccagagccagtgagatattcaaataaagtattagttctttttggtgaccacaccaaaggaactacctccaaacagttctatagtgggaccaagcctcagcttgagttttagaggagacaaaccatattcagataaggccagagtataaattttatatttcattggctgctgcttttggataatcctaatttaaatgccattgcatatcctttttcaaatttaatagtgtgattttgttggtatgtgagtgtatacagatgtgttctcaggaaaactaaagtattgctaatagctatagacagtgtagaaaaacagtatcagagaaagtatatttaagcagtgtcttcaataggattcttaaaagttggagattctgcaatacttgctcacagatattttaagtggaataaaatctactattacattatgattagatgcataaaacatgcaaaaatttactaatcagtcttgaaaacaatgacttccaatgtctgattaaaactagaaaagaagcaaccagaaaacaaagacttaatatttaaatagaaattgtcaatgattgcttacattgcagtcattcccaaaaccaatttatttaacaatgcttccaaaattacacagtgtatgatatgaagcatgttcaggctaaatagggtctttgtattgattgaaacagtaaagaaatgcttaattttaggaattaaagatgcagagaatagagtagttgttagtactagaactatctgttgtacatcttagccatgtaagtgtagctcaacttttgaagaggactatgtttatgaaacaaatgattctagtgttaaacatcttaacatgcaaaacacacatccttcctaatgttgtgacctctgtatatttgaactctgattattctgctgggacaaaaagatctatatccagctcattttttcagagattcaggaaataatgtaaacaacaccttggaaatcatctagctttaaacatatagaaaacatatattatctaagaactttctataagataattctacaaagtcttacacatataatatagcttactgttaccaatccaaggaccacaagaatatgttgtaaagaccataagccattaacacatcagcaattctaggactcttctttggttcatttataagctcataaaatttctagttttacagattttgcatttttccttaaaatgtatttttgctaatgtctatacttctggcaatactttcattttgtgttctagtttatgcattaacaacggatttactactatttgggatatttgatattgttaaagaaattaagtaagccaccttctgttgggcttcagagcccatttaaaatttaaagtctaattaagtggggaaaatacatgccaggatgtaagtccttaaaacaactttgaactgccctattctgtctgaaaattatttattcacaatagaaataagctagtgactgtgccagtaccccttgtttttaatttctataaactgcttagtagtgggaaaccatggcttagaaagagtatcattttaaagtagagctcccataatttggtttactgataatcactcaactaaaatctttattactcagagatataaagttatctctaggaacaaggggtcagagatggcatctgatgagtgtgactatttctttgactcagtgtcttattcctgctaagttatcaagtatttttcctgggcaaggagaactgggcagtgtcagccccacatgaataaaacagtctatctcatggagttctttattgattgtcttggaagacattaattatggctgtacataaaaagggtgaaacattttacacttgtccaatctctttaaattataaaataagctattggtattataacatataatttgttaatgaagaacagactcaaaaactaggaagtcatgaccaatcaaggaagagggagttttttaaattattaattttccccagcctgagaacattttctcttcctttctctctcctcctacttcttcccctaatctccactctccctggcaactattccctatccactcctactttctcttcagaaaagagcagtactcccatacatatcagacagccatggcataacaagttacaataagactaggtacttcctcttctattaaggctggacaaggaaacccagtaagataaaaagggtccaaaaagcatgtaacagagtcagagacagctcatgatcccactctcaggaaccccacaagaaaaccaagttacacaattcttacatatgtgtagaaggcataggtcagttccatgaaagctctctggttcaatcttgtgagcctttatgagaccatgggcactgaattctgtaggttttcctgtcatgtcttggatccatttggctcacacaatccttcctctccattttttcacatgattccctgttatgataaatctttctgccaaaagctacctgagccccaccgccacgtgtgagctttatgccagctgcccgcccgaattagggcccaaatgaatacacagaaacttgtattaggttcaaagctgcttggccaataactaggacttctcatctgttagcttagtcttaattatcataaatctatatattttataagacttatcttatcggacaccttattggctcactccttgtcagtggatcacatcgtgccgctggagcaggagcagaggggaaaagaggggcccttcctgtttctccttcgcttaaatatgagtctccttgctatgtcacttcctgcctggatcagcacttctctactacatttcccagaatcctctttgactcctagtcctgtctaacttcctatctcattggccaaagagtattttattcaaaaatctgtaagataaacatacacagtacattctccatcaattccccaacgtccacctaatgtttggctgtaggtctctgcatctgttcccatcagttactgggtgaagcctctctgatgataattgggctaggcaatgatctataagtagagtagagtatcattaggaatcatttcattgacttattttcacagtcatgtttggttctatcctaggtttctgggatgtccagtctctgggtcctggccctccaggcagtgtcatgggtggactccctcttatgggtctcaagctggagcagccattggttggctaccccataaatgtgtaccacatttaccccagtatatcttgtagacaggacaaattgtatgtcaaaggttatagggctgtgttggggtcccaatccctccactgtaagtcttgcctggttataggagatggctgttttgggctccacatcccattgctaggagtcttagctaggtgtcacccttatagattcctaggagtttccatagcgttaggtttctagatcatctcaaagatgtccctgattccagtaatccctccttccatcctccctcaaacctgatccctcctgttcccatgtccatcccacatccagaccctcccatctacctttgatgtcaattctatttccccttcacagtgagattcatatgtcctgcccttgggcctttcttcttactcagcttctttggatctgtggattgtagcattgttatcctttattttatgtttaatatctacttgtaagtgaggacataccatatttgtctttctgggtctgggttacctcacgcaggatgatctttgctagttctatccattttccttcaaatatcctcatgcaattgttttttttttaacagctgagtaatacttcattgtgtaaatgtaccctattttctttatccattctttggttgatggacatctaggttgtttacagtttctagctattatgaaaacaaatacaatgaacataattgagcaagtgtccttgtggtatagtagagcatcctttgggtatatgcccaggagtgataaagctgggtcttgaggtaggttgattctcaattttctggcagaacaccatattgatttccaaagtggctgtacaagtttgtactcctaacagcaatggaggagtgttccacatcctcaccagaataactggtaagtgtataagataaaatgtcagagtccccctgatcattagaggagatagaggctgagagaatgctgaaagactggaagctatggtaaacagggcatgtttgtatcatcatgatgggaggtcattcttgcttgtttctactactaactgacattgggcaagcatgtattacaagaagatctatatcttgtatggttaggatatcattatttagataaacaccagccaaacgcaagccagagtgtaccaggggcagcaaggtaggcaggatagagagaaggggctcccatgtgccttgtagccccttaaaactctatcatgcatcatcttgaccttatcttgaccacaccctgacaggtgtttttaggcacacctgtagccagcttctatcaggcgtggcttaaactgtcccctacaattctccttttagtttaaaagaggattaaagcttaacagtgtaatgtatccaaaattaacaatcataaaggtgaaatacaagaagatataataatctgttatgacacatcttaactatgtctatatctgttaaaccctaaggttatctgaaaagaggtgtccaagcttgaacacctttttccaatcccaaccataaacaatagtaagttatccctaattaggcttactctacccaaatagacaataatgggggaaggaggcatagtatctttccaccttgaaggaaagagctaagaaagacaaagacagtccccaattcttctctcatttgtattacattaattggcttggtgatacaatatagaaactctaaagtttagttaaagtttagtgtttgcattttagaggaggaaagccaaatctacctccaaatccagtattgatttaattgaatagggactaggaaaataaagagaaatagagttctttaagagacagttgtaaagtttaccgtatggtacggtatttttgtttgatggttatagctactttctcttcttaagcatctactcatgtagtgttcttggacttctgtagatgagtttttctgtgaagatagaagtaaaatacttccctttcctttgggaggtttttatttagtttatgagatatactttagtaaaatacttgtcacttgtccttgtcaagaggtttgtcttttttaatttaaatcttgatcaactttgatcgtatccacagtttttcttctcctgtggaaacaaatgcaaaacccctacgcaatgtaacacatgtcctggtttccatacagaggttcatttgtcagatgttggttgaatgcctgctgtgtagcagacactggtgtagatacagaaggtacaagaaacatttctgccttcagataatacagatacatgaccaggggatgcattataaaacccatgtacatatgttaactctgctctcaactgtccctttcagaactaatgttgaaacttaattggcatctataacagtattaaagtcagaatctgtaggagagaatctgaccagttcagagttcaaccctctcttgggtcctcattctcttgccctatggctcctctgctgcagcaggagactcaccagagcctgttaccttgctattgcacttctaggtctccagaattttgagctaatacatttctttcttagaaatcatccaatctcagatagtctgttattttagaacaaattggaataagacagtattttatgtgcttttatataaaatatttaatattatgtgtcagcaatattatcagtgatctaagttataaaaatgagttgtaaaagggcaagaaaaacatttttgtaaatcataaaaatatatgttattggaatacaactgatttaacactatgaaaactcgaaaaacaactgattttttttaactttatgatttaccatgcagaccaaatttatgttcaggggactatcaaagcaaagatagtcacaaaatgagtacaagtatgatgtgttatctgataataaatgtctcaactgaggaaaagataaccagaaaagataaaatgagaattattttatccaatttaatcttataatttagactatttatactttgaaaataagtcacctgatggttccatccatctgaacttatatgagagttaccctggttatatgcaacccaggtattaaagaattggttctttggtatatggctcagcatcacattataggcttctgactgagattggcaaatgtgggcagaggataggaatctaaaagaggctgggacttactggcaagggttttgtgacagaatagctcccttacatgaggtatccccttgttcttttctccttttctattcacacagatagttgagaatctggctaacacccacagcttccctgggaaccctcatcctactaggatgctgtcattgtctctggatgctgtgcttccagaacaagaatccaaatgacttaaagtgtttcagaggattcattctttgggaagttttgctaatactttgttggaaaggttaaaatctacaagcctgatgactttacatgcatttgaaaaatcaatttaaaaagaaatgcttgtgccagccactggaactacaaatgagttgaaatccattcaatttttcttgctattcaaaatgggtctctagtgtttttgcattttagccaaaagcttttagacttaggataaagctctctgagtgacaagataaaatgcatatgcattttatttctaatgcatttcgttcctattgcatatcttcaaggcagactttccatgtttaaaaagaaactcaggaaaaataaaagatttaagaaggtctgggtcacatgaggcaaaaattgtactttactcaatgaacattctctaagctgagcatacagagggatctgcattatccaaatagcctcgtacttttagtatccaaaaagatttgatgacttatattagctcaaatgttcttttctgtaaatgtatagaattgtaagagatccatagaaagtggtattttaaagatttatgaccactgttcccaattttacttcttttcaaggtagtatttaacttaatatttttttaatataaaaagaagacagacaggtttctagcaaagctacaaccatgtatcagtggaggagcagacctagggtgggaggggatggaggagactgctggttgctgtgagcaccttgcacacattgcatatcttattttatttaattgttgtgacacccttagagatgtcaacatttcagttcctgttttgtgaacaatcaggctaaggcttagtcaatgtaagaacctcactaagaggtcatgcagcaaatgcatggctatgccccacttcctggtctagtctacttgaagcctgtgtgctccatgctgtgtccctgcatttcctttaagcagaggctcaggaaaagctcactctccctgctgtgccctcacaggatgaccatacacaatgattctgatgaatggaaagaatgccagagttaggttcagaggaatttggttctggacctgggtcctgtcttcatcactgactcaccatgagaccctggcaggtaacctactctgctagatccatttgagatggagcacatgaatactcccttgtgtatcaagtactgaagcttgttcctttgcttgagtgttaagattgatctactttagtaagtttgtctcagcatcaagagcaaagggctttgtgaactccacagggctgtgttacgatagaaatttttttctcaaggtaaaatgcttataatgatatttgaggacatttaagtcatttatttactgagccatccaataaattaacagctgagctcagctcattgcttattaggtttcaggtcacctaaataagggttcaaggagaattattgggactaacctatgctttagttattccttcaaactttgtcataagaaaaataaattaccaccaaaattacaaatgaagagtttaagaaaaaagctcataaattactatcaaatcatctaccaatgtactgctactggtttatatatttcatagattctcgctctctctccctcccccacccctcgtgtatgtgtgtgtacctgtctgtctctggaaaactcacatgtgttcagggtgggttatataatataatacaagaatcattctatagaggtgtatattgtgctaattattcttcatgttatgctgagatttccatgtcattattaatattttagatatttgttaatagctacacagtggtccctaattttggactttgtattacttccaattttcttcattaccaaatggtgtgtctgagaacattgtttaatgaccacacttgcctgaggttctcattatttctctggtgtgtgtttctcagagtacttcaagggatataaatttgttgcactcaatttagttcaatcagttagtagttccatcagccgtctctgaaactgtcagtttccctgtgttcttacccacaatgttttttttttcttttaggttaaatgttttgaggtttaaagagatatcaaattacttttcagtaaatactggaagataacataggatgggagtaaacatttaaaaactgataattagtcactgaaatcatactgagaggtgtttattcaatagcaccacttttccaataccattcaacagtaatatataactaaatattatatgttatttactatgttacactataatgtaaactgtttacagtaactgagattataactaacccgatgaatggcagattggtaccttttttggaaattctaccatttccagtggtaaaaagcatttatggcaaatgtattggctctttgatttctccttgaaaacaacctgtttttaagacaaatatccaagaccattctgctttaaatacagcatttggtatgtcttggatatttgtcttaaaaacaagttacttaaactttttagttgccttatgcaaaaatttttgatcatattgctcccatgccattaacagaatgcaactaatcagaatataaaggtaagtaaatagaatatctggtgtgtggtaattcttaatgtgtacttcattccactcatttatcaatttgttcattttacatatagatttgttgatatacacttacatgatttattcatttttttcaagccaataaaatgtctttattaaccagcctgtgtctacactgggagttgggacctaagtgaagacctaggcctttctcaggatgggtttcagcacaaaaacaacttcctggaatgacacatcttagttagcaagaacagctagccagaagcagaattacagaagtcaaaaagcaaggttagtacatttatactttcccagaactatggactttgattaattgggtctttgttctttttttggcaggtgctctctacatgctgcattccaaggcctgttcattatgtcaccagttgttctaaggtctgggtgcctgtaatgataccatggctttcatcattgtttttcttttgtgcttttgagactatgtacacactgcaaacatcttcccacttctgccactagatctaggattacaggtatgagctgctgtcagtccatagtcatctcatgagaaactgaatatttcaaaagctcatttaggctccccagtcaagaattatttcataggaaatagttttgggatgatccaccagaacagtcattcaccatagagaccaatgttctggttcaggaggaaccctgaagaaaggtcaaataagtttgcatattttataataaaatactatttttcatatgggttatttttaaaatgttaataaaatattagtttcacagttcactgttctgtttttatttataagtaggtggggaagtgacaggtaaatatgtagatgagcctcaagccttacagaagtttgcatattcttatcttcctgtttgccaagcctggggacacttacatcatttatgtaccagcagaagtaatgagaagggcctgaggcagaagaatcagtgaaaccccagtcttatagacatccaaggatctctatatccacagctatcttgtgttctttagcagagaatgaggttattcacagtttagagctaatccaagttgaactggaagccttatggtttcagcctttcagtctacctcttgagattaggattgaatgggttgttacattatgcaactcccatacagtgtagttgctgagcaactagtctctgatttgtgagaaacatcagtcagttctttgaatcatgattcattcaaagaccatttttgctgacatatataaggttcacaatttctttgatttggatttctcaaaatccagtgtctgtgttctccagccagaaaaatacttcaggcttagtgagattttcaattttcattatgttcacaatcatcaacaaaagaaccaacgagttgcctgccaaaactcttgttctgccactgaacttataaccacagttgatgttcgaacctcgaggtgtccaggaactgacaaatctctggatggctagaaatccctgagcatttattccagagttcctgcacaaagtttttgtggtggtggtgatgtaggcattcgtgcaatgaactgctgaaaaaaaatcaagaatcaactgatatatttcgtcatgcaagtagcctctttattcatctgaccaccattctacataagctttctaagtgtgtgctacatgtctcacatggttccagggtctcaaagtaaacataaatacttaaaagcccctatcttcaatttgcttgttctctagtagaatagacagatcaggaagacgaggcaagcaagtgctgtataagcataaagaaggactacttagttagatgtaggatgtcagatgaacaattccaggagagcaacaaataatttgaaggaggaagtgttagttacctagaaaatgagagagaaaagacctcaagcaaaagggacaaggtagtaaaggttgaaagggagtttacagcaggattgaaagcctacaagtgattaaggaagactagaccattattggaggatgaaaagaatcagattgaggctatctctatttggggctgaaatgtgaggctattttttcaagtcttagatttccaaacaatggaaagttattttctttacctttgcggctgttctaaacctcagcattttccacacaagaaatataaagtacattgtcatatgacccaaagtttcactactcattttcgtaatagtcatagaaaatctctactttagatttcagtttgatgcctctcctctgttcctcatcaaatatccatgtaaacaagtgcactgtttttctttttcagatgctacctcaaatgtgcagggaaggcagtgaatgttgtagtacttattttctcattgattcaaataaatattgaataatttagtggaaggtagatacattttggctagcagttcaagagtccatcatggcagggtgctcatggtggtgggagcaccaggaagctgatcatccatgggcaagaatcaggaagaagttaggaagggggtgtggctgttagatttcaaggcctgcccaacatgactcactttctccaattgaacccggtcttaagatcttcctcctgctggagaccaatgttcagatacttcagacacaacaggtgtatgcttgttcttaactctattctttaatctcatttcaagtaaccaaacaatctagttggttttggtgaaacacattaacaataaagccttattggtgatccttgagttaagcaataatccttagacaatctatctgctataaaaacaatagaaattcattagttcttttagcaaggctcaattttgtgatatataaggcaccaggtagtcaaatgagtgcaaccctcttgaatgagtgaaatcaatgcaagacagaaaagccatgtttattcagagtctatctgcacacaatggtcatcctcacagagctactagttcagtgtgagcatgcaaaggggcacttgccttccttcttttcttgctttcaaccaatgagttcaagtgaattctctagttttggagcagcccattaactaggacaattatttcaccttcatttagcaccaaagcctcctccagtaccctagagttaaagagcaaaagtcaattcacggaggggaagcagatgctattaaatgactcactcaagatagtacaatttaggattggagccaaaaatagagcaaactcaccaggactgatgtctggatggcagttatctggccaggaataggtgccttctggtgtgatgtgttagctgcaaaaattcacaggatatggacatttttactttacttagagaagacagtggtttcaaaaactaaaattcccacaattacagcaactaatattaatatgggttttgggatttattaggttctatttattttcaaagttactgtatcttttaattttcaccattaagtatcaatgaagtagatccattctatattttagtgaaccaattgcatcatatattggttaagcaacggcttgctatcatacaactactaaataaatattagaatccagaatacagaggtgctcccaattccttgtgactttgtccttagtgcttgtcatgtgaaagatgttgctcacatagaatgaacagccaggatctattgaaactgaagatcacatgtgtagaataaacaatctgtcactttcccagcttcatatggcagtctctccagaacccatgtgatccaatctattctttacgagcacatggtgtttaagcctatattctgatgacaattttcactgtcactttgcctactttggaaataatacaaagatctttctacacccaactcacaactctttccttttatataacattgttaccctcatctgtccctttatcttttctgcttttccttctctgaagtcctttttttcatatgccttattctgtttctctattagactatagactttgaaagcagatgatcctgggctccaatctaacctgttctattataactatgaaaatttgactatggtgtccaactctttttagttaacttgtttaataaacatttcaatttgtagttcataagtacaaactccaaaataaaacctctattatcagtcttacatgttgctttgtctgctttcaaatatctggtaggattattgactgttaaaacctaacgtgaagctacttctgaagacattctttttagatctctctgtatgattcatatgattaagtaaaaatattatgtcataggctcgatgatggctcattcagtaaagtgcctactacacaaacttgaagacctggatctggattcccactgctgataaaatggagagagaagggggataatgctttatggttgaactcttatctccacatgcatgtgtacacacatatacatttgtatgcagtgacacaagtatatacatacaacacacttagacacacacagaaagacacacacagacacatacacaccacacacacacacacacacacacacacacacacacacacacacacacacacacacacacggtgcggggggtgggggggcgttatttgcctcccaaatctcctaaattctgtactagatttaatttggctacaggttatcagaatatgctttcttttctagccaaatgattcaaaattttaaaacctagctgcctctacaggttctgaatataatttcatatctaaaatactccattttagggttgtaaagaatgaataaactatgtaacttgtctaataccttggcacacagtaagcatttggcaggtagctgtagcagttaattctaaataggttcatgtttctttgttcatgtttctttagattcatgtttctatgttcaacatagaagaggcaaccgcaaaaggacaggccaggcagagaagcacagggacacatgacatcttaaagagaagatttaaaatcattattttgtaaatgattttagttcattcatggtgactggtgttttagcaagctgctgtctttagtaatgcctaaaacctaaatgttacttccaagcctgatttgttacctgcctccttcttaaagagtgatttgggcacatgagaaagcatcaataaggaagttatatgtttaattagtcttcgacactctgctttagcaaatctctacaaagaattgaggcttgctttaaacataactccatacactgagacagaaagtatggcagctctcctagaagaagtgacacatagtggcaccaagttgacccttaataaagaagcatggagtctctaagtcgatgatgagatggaggaaatgcatggccgtgctgtctcctggaataatttcagtgccaaggcggtctgattgtgagttatgaaagaagaaactttactgttcgtacccaggaaaggaaaaatcaaaggaactgcaacagaaagtgtcatagctgtctgtgacaaagtgtggttaaaaatagcccgtctcctttgggaaaagtagaacttattctactcccaacagataattgctataaccaccccctctggtgttttcctatgtctcaaattggataatgcttccccacagtaacactctggaaagcatctactgaatgtcttttttggtactcagcattgtgctagaaactggaacaaagcattcgccaaagatgaaaacttatcaccaggacaatttccacctctgttgaaaacccaaactcaattacagtctaggcagtgttccctcacatcaaacagggaaaacagtatattcaacagtctcacagaagaaactctcacacaagaactgcataagggcaatgtctgtgaacacctttgtcatcaagacacttgttgcttgaagcagaccattaaaatcaggactcaaatctgcacaataagaaggaaacactgaactaagcctttctatatatcactgatgaacaatcagaatattaaatcaaattaattaatgtattcattttaatatttctgcattatttcaaaaacaccattcagtatcccataaatatatataattatgacttaacaattaaaattatactattttttaaagtttcagttttccattaaaatttctgttctaagcatagaagtgttttcatcctctgattagaattctaactcctaaagttatctgtctctcctagaccttcctttttataacataacggtttgctgttgatggaatttccccctcccacccatatgttaaagtcctaggcaatagtgtaaatgtgtttagaaatgaggccttttggagattagacaaatggcgagcaaggactgtcctgatggaaatcatgtctaagaagagacattgaagacatagatcactctgtctttgataatacccagggagaggctatcacacaagccagataaagacccttactggacagtgatcatgttggccttttgatcttgtaacacccagaactatagggagactttttttttcttgtttaaggtatccattgcatggtattttgttacagtagccaagtagatagaagatagaattcaaacctggaaacataaaaaatttaaaaagtatttatttgttagatgactgacttttttgtatatatgtctgcatgggcttgcatgagtttatgtgcaccatgtggaatatttgtttaatgatgtaaagatgtgttgcatttttttatgttgcatttaactctgtgaagctgtgctactttgcctgtctaaaacacttgattggcctaataaagagcaaactaggcaataggtaggcaggagagagaaatagactggacaggcaggcagagagaataaataagagaagaaagagataaagctggaggagtgaggaaaggaagagaagaggggttgccaggggccagctactcaggcacatagccagatacagcataagaaggaaagaaagaagtatagaatagagaatgtaaaatcccagatgcaaatggtagacaagataatttaagcaaagctggctagaaataagccaagctagggttggaattcataagtaagcataagttttttgagagttgggtggtagggcccgaaagagtaaagagttaaaaaaaatctacacactagtgtctaacgacttagctatgctttggtgacatgggcctaagaagcagtaaaagcactttatttaagaagtgcagtaagaggtagagcccatctattgatgatgagcattccttaaattctctgactcacacttgttacacgaaatagcagtggaaagttgctttattatttctccaaacccatatgaaattaaaagcttattggtttgccatttaacactgtaaaatattaagtaaagttaaaagacagataagtcaattctcctaaagcttttactttttaaaagagtcatctgtacacaattaaatgtcatttttctcattggtgtgactcactttttgaagacttatgttatagaagtctaacatagtggcacatagaccatgttttgtgtgactaggagaaagatttgggtcaagttttattggttcctactttatcaaatttggcagcacagctgtgaatacattttgaagctatgtctcactacccctgtggtgagctgctggatattgaaactccatgggaatcaatctatattgcataggcagagtacaaatcacaatcaccctctgtccaggaagtttttgaacctatcatcttgcattagctgtgcaaggtgatcattatttgaggactctgctataccccagaaaatcagcaaatgcttgtctctgcctatgaataggcttatgtgactccaggttctttataacacacaacaaaagcttctgggttttaaccgttaatataaacttgccatttctgcttttgtcacccctgctcagctatgcaaatatgtcttatattagttggtgccacaattgttttaaatgtcatatcaattaaatgataccttctcaaaacactttagagaggtggtcttctttccttccttccttccttccttccttccttccttccttccttccttccttccttctttccttcctattttagttatctgattggatttgtgtacaagacaatgaagttcaaggattcagagggaccaaagagtattactataaagatagattctcttcattccttcttggtattggcatctagagaagttggagtttttggtcagtgagtatgttaggagcttttctggcaatagttggtaattgaaaatacttgaaggcatgctcaaattttatgtgtgcacctgaaagaaattagctgagattctaaacaaagttattaatagacaaaactgaaaaaaggtggttggtattttttcctatctttgttttaaagttaataactactgtaatagctacccaaaccattacatagagaaactatagcattttattcttttgggggttaagtttctgctacactattacaatagcagttgtagagtttagacaaggaacaaaacactatcatggaccaatattacactatgtcctaaatggtttttatagtactttctttctagtctactatatatactctatttatttatatatgtatatttacttatatatacaaatgtatatttactcacacatatgttcatatatatatatatatatatatatatatatatatatatatatatcctttaagttggctttataaaataggattcccggtcatactttgtcctgtataaatttttaagttttcataactgtgaaataagacatctaaactacaaatataattataaactaatgttgaaaatgaattaataacctgttggcagtagttatttgtgagctgtagaattctaagtacattttaattttgttatgctttcctaggttctgctgacttctagatagttactattgggtttgatttaggcaaaaatataatttataagagaaaatgtaattactgacatagtactttgctggtactcttaaaagagctgacatttttcagaattaaatggtccatttttaagagaagctaaacacaagagtcccttaaaaaacaatagattcaagacaggctattatgttagatgtttaattatttactaaatccagctttctgacctttggttggaattatttagcctaccaaataattttcctagtgggaaacaggagttccatgtgtgtgttctatctgatggataatatggtaaattgtcgatctgtacctcttactgtacttgctgtataatgcccccatacacacaatgaagattaaacatgctgacatacagttatcaaataaaacataaaatttcctcagttacctttcattttcatttattagttctagaagattttgggaacaatattgtaagatcccctacaaaagggtccataacaaaagggcctcatgttttttgatcaatatcaaatgaaatcctggctggctaacttacatgaatgagcttggaagtagacttttctccagttggcctataacagagtaaagtcatgccagtattttcagtccatggttgtaaggtgatacattttagagcaatttgtaacatagcgattagtaattaatgcaaatggatatagaatacattggttttgttctataacagactttgaagttttgcctttttaagaaagtatagtctgacatttataggtgtctgtgaagggcataagaagaaaggacacgcttgtattatccttcattcacagtatagtagatttcagtgaagggtgtaagttaaagggagcacttgtgtgatcctccattcatagtgtagtggatttctctgcgatgaacagaatgttaggaggcagaatagtcttacttggggactctgggaagtactctgtgttagactgacctattagtccattgttagttattaagattactaatattaattgttcagattgattttggtgggtcctgatttgggctagctcttgaggaatgctaattatatggttgtgttgaatagagacagtattttaggaaagactttgtgcagcctgaaccagcccaaagttacccatattttgtgaagtaagccttaggacattaatatagaaaatgaaaaacactggagaaaaaataaatgacagtttccaacatgagtgctaacttctgatatgcaaagaatttgtgagaatagagtgattgcacaagggaaccagcagtattcttgtgtgtttttataaggactgactcagaggaagagctgcttccaacatactggtgcctaagtattccctatagtcctacaaatccagtgctgctcaacaaaggtcctgggacacttgaagagaacatgccccctgtcacaagcagaatctcaaatctgtaataaacattagcttgcaaccgaacaagtgagaaagaacccactttcactaaaagacctaatttataggcaattcattggctaggcctgctccttttaatgaatgaatgcaatggtttttgaaaggtttttgaaagtataaatttttcctgttatttctgaagacttaaagtaagaatgactaatatagatgcctcgaggctatacttacatagatgaagcataaagggtgctaagaccatatttttgtaattgtagcttgcttatcccagttttaattctaacatgaagactatactagaattaaaaatacatataacaagacaattgttatgcagatattctagacagtaagattgtgtgtgtgtgtgtgtgtgtgtgtgtgtgtgtgtgtgtgtgtgtgtgtgtgtgtgtgtgtgtgttaacccaggtgaagaattggacctagactctcttcctggtaggaagacaggtagggggaggagacatgggcaactaattaagggtagtgaacttccaagatggccaacttctttcttaccctcctggcctaagggtaaaaaaaaccctggaggcttaaaacaaaggccttttaagacattttccccctgagactggattttctgctctccatcctgcttcagggtctttcttctatgtgtatggcagacagtatctgtgtattttctcagtcccaataaaagcctctcttgaatttgcagactctgttggttcttgtttgtggtgtttgccatttcttcactgttacctggagcactcaagaattttctttcttaatcctttaactgacagagaaaaatgaacccattctagaacttctagtctgcatcacaggtagtttggattatgcatggagactattgagtgagtcatggttccaaagaccttaatacaacaataacttgcacaatgttgtttttgttaaaattttaatttttttttttttggttttttgagacagagtttctctgtattactttgcagcctatcctggaacttgctctgtagaccaggctggcctcgaactcacagagatacgcctgtctctgcctcccaagtgctgggattaaaggcatgggccactatcacctggcattgtttggttgttttaattgggagaatatataataagaattttgagatttcagtaagggtttttctaccttcttacctaatgatgggattatccatattatctatgacagacatgactttcaaaggactgcttgagatatattttcccatgactggaacattccttcattttgttttgttattttattcccatttattcatactagaatctctctatataagggaaagttttcttgctctattctctcatgacccctttggcagattctagaaagttctttgtcataaatatccattgggacacacacacactagacctctctctttgtctctaattctgtttttctgtctgtgtctctctcacacacacatacacacacttgcacacaggctgacagagaaatgtgctatggatattagtttgaaaaaaatgtcaataatttctttatctttatcaaggaaagaacaatagagaaaattacagttctgagtgactaaataaccaacaaattaatagctgtagcagaaagtacaagaccatgctgagcctaaatccaaatgtctagcttagtcctgacacattaatggatcccccaggaaatcaacagtttctactttttgctaacagatgtattccccagaaggttccaaaggcacttgagtttttaagagtccaagtaaaacagtgactgcatgtgcatactgcacacatatagtgacatgcctgaggctgccttgatttctggatggtttgggttcaaaaccagacgtctctctctctctctctctctctctctctctctctctctctctctctctctctctctcacacacacacacacacacacacacacacacacacacacacgtatctgtgagccacaagatgtgtgcttagaattgaatccaggtcttctgcaagaaagcaagggatagccgggctttggtggcacacacctttaatcccagcatgcaggaggcagaggcaggtggatctctgtgagttcaaggccagcctggtctacagactgagttccaggacaggctacaaaacaatacagagaaactctgtctcagaaaaactaaaaaaagaaaagaaaagaaagaaagaaaggaagaaaggaagaaagggatcttaactgttgagcattacccacatctgcctcctttgcaaaaccttttgtaagctgtttcttccagagtatgttgtgttgatggctggattcaagtttcatcttgtattaattttttcacaagagttaatggaattgaacaatacccaagtaccctactgtcttagggtagattcaggtaataatctcacaaatgacaaggcagagatatttggtcctttgctctcttaggactgtgtagttgtaattactctggttaaaatacttaaattttcctcctcttcttaggagcaatgtcacaggtttgaaaaatagtgactattaagtgaatgactaggtgaattttagtaataatcactattgaagatctaaatatataacatactttaagtctgcaaggcctgcgtcttccataagataagtcttatgattatggttgataattaagactgagatagcatataagaaatcctagtcaatcgaccagcagcattgtaaactaatataagactctgtgtgttattctgggtgcccacatggcagcagaacttgggcggctggtggaaagtgcccacatggtgccagggcttgggctgctttggtagaaagatttatggttataaggaactctctctgatgattactagataaggcactgatatatcaagagttattttattgactttttaagaccaatagtatttggttttaccctacgtctctaaactatgtagtcttttgttcttgtttacctaagcagtgtcagatatgggttcattctcatgcagtggaccttaagtcaaatcagttattggttagctactttccaagttctttgccaccattgccctagcatcttttgcaggcaggacagattataggccaaaggttttatggctgggttggtgtgcacatttctctttggtagtcttcatggtaccgtcatgcactacacacactagaacataggggtgaaggctccatgtaggcaccagctcagtctctccatgtttaattagttgtatggatgttatcctcagcaatgggtcccttgctgtcagtttgcagagagcaatcctttgtcttaacaacagcctgtgttgtttggggggtttccatggaaactcattggataacaactcaattgaatgtaaccaagtttcaccactgcaagccttgcttggctattggagatgatcagctgagactctacatctctcagtactaggagtcctcattaggatcagcttcacagattgcaggaagtttccactgcactgggtttctataccccaaaatgcctccccagtttcagtcatgtgttccccgtctcactctctccacctactcctcctgacctacccactcctgttcctaccttccattagtctgcctgtaaattctgttctgtttctgtctcccagggagatccatgtgtccctgttagaaccctcctctttgcctaacctctttgggtctacaaatttagcttggttatcatttacttaatggctaatatccctcataagggaatacattccatatttatattaatatgtctgggttacctcactcagaatgatttttatagctccatccatttgcctgcaaattttatgatgtcattttgttaataatcaagtaataatccattgtgtaaatgtaccacattttctttatctattcttctgttgaggggcatctaggttgtttccagtttttggctattatgaataaagctgcaatgaatgtggttgagcaagtgtctttgtggtaaaaaagatcaccctttgggtatatgaccaccatactaatttctatagtggctgtacaagtatgcactcctaccagcaatggaggagtgctcctcttgctccacatccttaccagcatgaggtgtcacctgtgttattattgatcttagccccttagccctctgacaggtgtaagatagaatctcaaagtagttttggtttgaatttccatgatggttaaggatgttgaacaattctgagaaatgtgtttatcagacatttgagattcctctattgagaattctgtttatatctgtaccctattttaaattggattatttggttttgatatctagtttatgtattttggatattagtcctctatatctttcccattctataggctgacactttgtctgcttgatggtgccctttgccttaaagaagcttttaagtttcatgaggtaccatttattaattgcacttagtttggtactatcagtgatctgctcagaaattcatcttatgtaccaatgtgctcaaggttattccctgttttctcttctatcagattcagtgcatctggttttacattgatatctttgatccatggggagttgagttttgtgcagggtaataagtatgaatctaattgcattcttcttcatgcagatatccagatgaccagcaccaattgttgaagattttgtctttttctaacagtgtgtatttatggcttctttaacaaaaatcagattctatatatgtgtgggtttatgactgggtcttcagttcaattccatttatcagcatgtctgtttttatgccaatataatatggtttttatcactatagttctagtacacttgaaatctggaatggttgaacattcggcagttattttcttgttaaggattgttttagatattctggattttttccaaatgaagttaattgtccttgcaatgtctataagaattatgttgtaattttgatggagattgcattaaatctgtagattgcttttggtaggatggtcatttgactatgttgatcttaccaatccatgagcatgggatatctttaatttctttctccaaagacttgacattattgccatacaggtctttcacttgtttggccagatttacaccaagatatgttatagtatttgtgcttattgtgaaggttgttgttgccctaaattctttctctttccatttatcatttgtatataggactactgatatttttagccaatcttgtatccagcctctttgccgaaggtgtttatcagctgtaggagttccctagtagaattttagaatgcacatatgtatactatcatatcatctgcaaataactatactctgacttcttactttccaatttgtattccttcaatctactttgtcttattgctctagtgagaacttcaagtacaatattgaatagatatggagagagtggacaacaatgtctttctcctaattttaaaagaatttctttgattttcctctccatttaatttggtgttgtatataggcttcctgtaaattgttttttattatggttaaggatgtcctttgtatcctttatctctccaagacttttatcatgaaatggtgttggattttgtcaaacttctttgctacctctaatcagatgatactgtgtgtgtttgtgtgtgcatgtgtttgtctttcagtttgtttatatggtggattacattgacagaattttgtatgttgaaccatctttgcatctttgggtggaaatctacttgaccatggtagaggattcttttgatgtgttctttgattctgtttccttgtattttattgagtattttgcatctatcttcacacaagaaataggtctataatagtctttatgtgatttgtatgtcaaggtaactatggatttactaaatgcatttgacagtgtcccttctgttcatattttgtggaataatttgaggagtattggcttgcattcttctttaagtctggtagtataattcttccctaaaatcatctgtccttggggcttttttggtggggagcattttaatgactgtttctatttcactaggagttataagcctatttaaattgtatatctgatcatgattaaatttttgcaattgaaaattatccatttcttttagattttacagttttgtgaagtacaggattttgaaatatatccttatgatattcttgatttccttggtgtctgttcttatgtcccctttaaatttctgattttgttaatttgaatattcactctctgccttttagttagtttgtgtaagtatttatctgtcttgttacttttctcaaagaaccaactctttgtctcattgattctttgtattgtcctttttgttgctattttatttatttcagccctgagtttgattcttgtagtccactcttcttggttatgatttcttctttttcttctagcactttcaggtgtgctgttaaattgctattataagatctctctattatcttttacatagacacttaatactgtgaacttgacttttagcaagtattctataagttggggtacattgtgtttcattttcattaaattctagaaagtctttaacttcttattgcttttcttttttcattcggtagagagttgttcagactttgtaagctttctgttatttctgttgctgttgctgttgctagctattgttaatcagtgatgatcttataggatacagggagttattccaattttcctgacaccaccagaatctaggaactctacactatcaagaactgagcatccaacaaagatgaagcagaagagaaagacctaaaaagcaactttatgaagatgatagagacagtcaaagaggaaatgagaaaatcacttaaagaaatggaagaaagtttgacttcttcctttccaatttgtgtccatttgatctccttttcttgtcttattgctctagttaaaacttcagggacaatattgaagagatatagagagagtggacagccttgtcttgttcctgattttaggagaatcatgttgagtttctctccatttaatttgaggtaggctgttggcttgctgtatattgcgtttatcatgtttagatatgttcctgttatccctgatctctccaagacctttatcatgaaggtgtgttggattttgtcaaaggctttttcagcattagtgagatgatcatatggattttctttctcagtctatttatgtggtggattacattgttgaattttcctatgttgaaccatccttgcatccctgggatgaggcctacttgatcatggtgaatgatttctctgatgtgttcttggattcgatttgccagtattttattgagcatttttgtatcaatgttcatgagagatattggtctatagttctctttcttagttgtgtctttgtgtggcttgggtaccaaggttactaaagcctggtaaaaggagtttgacaatgacccttctgcttctattttgtggaatactttggggagaattggtagtagctgttccttgaatttctggtagaattctgaactgaagccatctggccctgggctttttttgggtggaagacttttgatgactgcttctatttcattaggggttacaactcatctgttcttgatttaattttggtaagtgaaatctatccagaaaattgttcatttcctttggatgttagaattttgaggaatacaagttttcaaaatatgacctgatgattctctgtatttcctctgtgtctgttggcatttcccccttttcatttctgactttattaatttgcatgttcactttctgatgtttggtaagtttggataaaagtttgtctatcttgttgattttctgaagaaccaacttttcattatattgattctttgtattattctcctagtttccactttattgatttcagccctcaatttgattatttcctggcatttactcctccggggtgcattggcttctttgtgttctagagcttttagttgtgctgttaattccctagtgtgactattctccagtttcttcatgtgggcacttagtgctttgaagtttcctcttagcactgctttcaaactgtcccataagtttgggtatgttgtgtctacagtctcattaaattctaggaaatctttaatttctttctttttaaatttttcttgacccaggaatggtgcaattgggtattattcaatttccattagtttgtaggtttgagtgccagctcgtacagccactttggaaatcagtatgggtttcttcaggagaatgggaatcagtctaccaccagatccagcaattccactcttgggcatatacccaaaagaagcacattcatacaacaaggacatctgttcaacgatgatcatagcagcatcatttgtaatagccagaacctggaagcaaacctagatgcccctcaactgaagaatggatagagaaaatgtggtacatttacataatggagtactactcatggggggggcaacaatggaatcttgaaattcacagtcaaatggatggaactagaataaaccattctgagtgagggaacccagtcacaaaaagacaaacatggtatgtattctcatatatatggattttagacatagagcaaagaattaccggcttacaatccacaccaccagagaagctaggaaacaaagaggactctaagaaagacatacatggtccctaggagaagggaaaaaggacaagatctcctcagcaaattgggagtatgggggaggggagaaggggaaaagaggaagggtgaggaggacatgagggagcaggaaggttgagttgggggaagaatagagaagagcaagataagaaataccataatagagggagacattatagatttaaagagaaattaggcactagggaaatgtctgtagatctacaaagatgacaccaactaacaatctaagcaacagaggagaggctatcttaaatgccctcccctgataatgagattgatgactaatttatatgctatcatatagccttcatccagcagcttgtggaagtggaagcagatacccacagcaaaacactgaactgaaatggaatccagttgcagagaaggaggggtgatgagcaaaggggtccagaccagcctggtgaaacacacagaaacagctgacctgaacaatggggagttcttggtccccagactgatagctgtgaaaccagcatgggactgatccagaccccatgaatgtgggtgtcagagaggagacttcagatatctatggggcctcttgtagtaggtcagtacatatccctagcataggaatggactttgggagcccattccacatagagggatattccatgagcctagacacacggggtgggtctaggctctatctcaaagcatatgacagactctgaagaccccctatggaaggctttaccctccctggagagcagacaggagtatgggataggtagggtgttagttgcaggggcaggggaggaggggagggacagggactgggactgacatgtaaaacaatcttgtttctaattcaaataaaaaatggagaaaaattgaaatggcatgtaaaattttatgggtcttttttgtatattgttaactatattgtcatattttgcatttttacttaaaaagtaatgtgcttttaatttactttattttataagggaatatataacttgtcaacttaaaatatcttttaagaagatttaaaaacaaagaaatggaagaaaaaaacaaacaaaaaatcaggaaatggaagaaaagagaaaccaagaaatataagaaattaaaaaatctcctaaagaaaacatggaaatccaagaaaaaacaaccaaacaagtgaaggaaacaattcaaagagttcgaagtttgaaaactgaaattgagacaataaaaaagcaaacacagtctgaaggaatgctgacaatagataagctgggtaaactatcagcaagcacaaccaacagaatgcaagagatggaagagagaatctcaggcattgaagatacactaagagaaagagattcattgaccaaagaagcaagttccctgtcttttgattttgcttgtgtgtgattatttatttcccgtgttttcattgatgtacttaatctcctcaggttggcatttttcttctaacactttctgtagagctgtatttttagatagatattgcttaattttcactttattatagaatatgttattttctccatctatggtaattttttctcgttccatccatttgcctgtaaattttatgatgatttctggatttgtctttgctggatgggtgatttattccttggtttcagttccctttctggatttttagagagttttatgtctgtgtgttgcctgttttcctggcttgtttagctggtgtgttcacagggaatgcctgctggtgttggagagtgggatactgggatgagttgaaacacgatggctgaagtagaaggactttgtgatctcttgggaatgaggccagagaggaaaggaggaccacagtaggttttctgctacagagctggggattagtctatggagattgtatctcaggagcagtaggagaattgtgggtctaccttcaaccttcacgttaccctgggaggagcagcctttgcattagcagtgggttcctgccagagtgaggttaggaagggatggcccgtgggatccacaggggatccaggcaatgggttggaaggctgcagctgcagttctgtttcactctagtgttgagactctgggcttaggtctgggggagcaaccaacagaggcagcctacctggtattctggcaggtatgtctgtggtttagcaggaggtgcctgctggagttctgggctgagatgcagtaactagtagggagtttagaaggggatggtctgtgggatccacaggagatatgggcagagtagagagagaaggctgcagaaggctgaggaattgggtctgggggaacagaaagagaggagaaggtctgttttagcccgtttcttaaaataaagttcattttggtgattatttttatgtacttattattgtttccccataatctctgacagagttgaaaatgtattgttattatgatcagacataccatgtaatttactagttccttttattttgcccactaaagtaattaatttttttctcccaagtctggcataatttcaatctaggtttcattttactactattcgaaatgaatgtcctcaccccactcagtctctaggtctcctcctcctctatttttatttcccagtttcctcttcattttcagtgctggatcttcatgtgctcagagattctgttgtgggtggggctgtcacattctttactgaccttctgaggtgtcatgcctgaacacttacttatctttaagcacccacctagtttccatggatatggaatcttaggctacactccatattcccaaggagtctgaaggcatggctgaagaatttttctgtgttcagtgcttttgatgaaggatctgttgtgtacttactttaactttttgaaaggaatccatatatttttattctctgagatttattttataaaagttttttctcttgaattccagagatttgacaattaggtaccacagtaaggggttttcagtctcagaatttggcctttaataggtacctttcttgtagaaatagaagttgtgagagaatttatttgatagtgttacaccctagactttttcaaattctttccctgattatttattaacttgagccttgcccctaatcccacagtctctccctgtccctccctctttaacattcttttctggaaacatggtcttatgggagtcagcccaggctagccttgaactcattggccttgaatattggatacttttgtctctacctcccaagagctgggatagtacaaatgtgccaccatctctggctttaattttcttgtcattataaaaaaatcccaatgcaccatttctgtcattttgttccattttccaagatcctctcaactgtatctcccactgtgtgcatgtgttcctgttctcacatggtttttagttttgaagagccccttttgaaattctatgattgttactttatatagcatctttgtttccctttggagaaattaattatagtcctggagctatttcccagttctatctgcttttatagcttttgaattccctttctctttgttaaagccttttcagaaatattaagtctgtgcatatgggaatattcacataaagaacagatatgtgatgtttactgctgcacatttgcaggcatttgaaactggtaggcatcaccactattgaagtgttagttgtgggtttagccatgttgtgacctaactttttctgctcaataactaaagtatttctgccctttaataatttgtcatttcttatcagttgccatccactctaagctctctttgacattgttagtatatgacctttacatttgccaacttaacatactagctacatcctagaaggtgtacgttctgtaacaatctatacaaagtataacacttgaagtttttaaaatgtggaaaagggcatcttggagggagctttgagttctccttgaagaaaagcacctgggatgagtaccttgaacataggcagtagagacattgccccttaactgatctgtaagagatgtggaagggtttactcagaaaacaagagaatggaactgatggtgaatgttcttctgtgtgtatgtttgtcttcttggttgatgaatgaaacactgattggccaggcaggatgataggtaggacaaggagacaaggaggattctgggaagtgtaggcagagaggagttgtcatgtgacctgggaagtgaggtagatgggcagaatcagtatataagcaggaacaaacaggaaatcactcttctcttttttctctcctctcctctcctctcctctcctctcctctcctctcctctcctctcctctcctctcctctcctctcctctcctctcctcctcttctctcttctcttctctgcagacacactgagttagtcaccatgtaggactctagaggagtaacaggtctggaccctttcttgggtaagagaaaaccacgtggaaatacttatattattagaaatggattaatgatttagacagagctatccaataagaagccatagctagtggtcaacagtttcataattaatatagcacctgtgtgcttctttggggcagagaagggtggtgggacccttacccagccaagaaaactcatattacatggaacatatgcaaagaataaggcagagcaagtatgaagctgtgggcaataaaattgcaggcttccacacagtgctgcaatttgtacatcctgtgcatggctagtgggtgaacacgaggaaaggacttgagttcatcagctcagatcacacagcatctatctctctcactgtgttctggggctctgagcaaagcaccatggtaatcaaaaggagcaagtgtctgtttttctccagatagaaacatcaaaaaagcagtggtgatgctaggcataaccatataatgctaggcataaccatatatatcaaaatgtgtataccaaacaggaatcatttgattgaaacttgaaggcagaaacacatgtaagggtttcaaatttatatagaatataattaggaacatattgagatggaaggaaagaaaattagtgttagagatcgcagaggtacaaaaggtaatttaagaagcataggaagtctgtttgtctcatacaaagaggccacataaagatagcatggagtatgtaacatgaagtgtatggcattgaatgctagactgagaagtctatgctgacttttggatccaagaagctgtacacagagttgagtctacttaaaatggcaacagatgatgcccatgtacaccatatctatatgctacacacacacacacacacacacacacacacacacacacacacacacacacacacacacactccactccaggataatggcttcccatattctttgagcatgaaacatttttaaatatggtagtagtctgtaggggacaatgtaggctaagcctgctagaagctggccatagatgtgcctgaccatgcctgtgaaggcatggtcaaagtgaggtcaggatgacgcgttttttaggagctacaaggcatatgggagcctcttctctctggcctgcctgccttgctgcctctggcatgctctggcttgcatttgcctggtgtttatctaaataatgatatcttaatcttacagactacggatcttctcataatagtagtctctcaacttgttttcccatttgtgtctattatcctgttccagggaacttgaagaataaaaactaaatctatttccccattctagtagccaaacactccacacagtatgagattcttctctgtctgctactctgcactttctgtttcttccctcataagaaattactacccaaggaagcagtcaccttatattttatatcatttactatattctcaatgattaggtggagtttgacacataataaacactcatggagaaaacaaatgaagaaaaggataatttgaaatgtttcttctgatttttattgcattaactcccagaatattgagttgatgcaggagaaattctttctttaaccaaatcttgtccttaatttcgttattatagattattcctcatttctataaatgattagtgtgataaaactttaagctacaagatagaaatctccccacaccagccaaacatttcattcacggtatctcaatcatattagctgctcagtaagcctttatttatttaatttttttatcttaaataccaaacccagttcctcctccctccctttctcctgcctccctcacttcccccaccatcccacctaccatccactcctcagaggtggcaaggcctcctttgtggagtcaacaatgtctggcaaaccaagttaaggcaggaccaagtccctcctctctgtatcaaggttgagcaagtcatcccaccatagggaatgggcttcaaatagccaggtcatgcacccaggataagtcctggtctccctgacaggggaccttcaaacagaccaagtcacacaacttagttcagtcccatgcagggtcctcagctgtcagtccagagtctgtgagctcccactagctccagacagtaaggactttattcaatgaataaacatttttaagatagtgagaaaagctgcaagtaaggtgagcagtaggacttttccttttatggaaggcaggacttaacttctggttgtccattaaatacctaataggtcatcaccaatcattattatttccaatcttgaatccaaattctaaaagcaaatctttggcatcagccacaccaatttatacacatcagcatttctatattttacatgaaatgcagaaataattttgtttaaggcaaagcctattagcaaactgcttcagactccacggggcactcattaaacttgttcccactcagcatctctgggactagggtgtggaggtctgaatttttaacaagctctctctgtggttcatatgcatactgaagtttgagaatgagtgaagtgttgtattaaatgagtttcttctctgattctgcatttgcctctgtagctgaaatagtatgtattggccatctggagagagagagagagagagagagagagagagagagagagagagagagagagagactgagactgtagttattgttcatgtagattgctactgcaggaagttccctagtaattcttgtcaggcactaagcaatgtgatggtttttgtgagtaatgctctattcgttgcattatactgtacaaaattacattatttctcatgctttgtgtctctgggaaaaataaaattatgggatggtaatttctctttggaagcatttctggctgtatagatcacacagttcatgaggcagactcttcagagtcttctgggggagtagcctaggtattttagaaaactgcggtcagttctcctgtctctgggtccatcttggtatattgacaatgcctgctctgcaaaatgattagaacaaaaaggagtgggaatcccactcaagtctgactggggacagaaagcgattctccactgaggcagaatatgcaatacaaaagttagaaaataatcacaaaactcaaagaatgaagcaatttccccctctgtggaaaatcgaaagcaaatcttggggaaagggcaaagtatttgagcaatagctgtcaacatttccatggaaggtgggaagtgaagagattgcgattgaatggaggcacaggtgtgcttatcaggttgaaatgggctcaggaggagaagttcttttttcttttttcagccctagcgctaaaagataattaacttctgtctgcttccacgattcagcctgctttatagtgttgccgaaaatgctcacaagttggcagtgaaagccaaaagcattcttaggaacttgtacagatttttgaggagggaataattagaacaaggcaaatgggatttttcaattgtgactggccaggaatttaatgtctatatgctgcacacacatttatagttggaggcacacatgtgcatttgtgtcatagtttcccttaattaaaaactcttaatgtgacttggcaaagaattctagctgtatgttcagatatctccacaagggctgagaactactcagctgtagctctgaaaaaagatgacattgggaaactcttctccacttgcacccttaaattcatcagataaatagtactgagaatagctacaatgacactctgtattggtgccacaaggtaaacatgtataaaatattataaattattcctgtcttcctgaaagcctaccatcatccccttcattcctcaccatagtctgataggttttatattccagcattcaaagaagtgtgggtaatatgccagagcagaaatgctacttggtagcattaatggctaaaaggagtagttactcatccttatatcatagaaggtatacagccattctctagtatttgggaggtgtttggaaactgtgagctactgaataacagagaggatcttccttgtaaattgcaggcttcattgcctaagttatagagtggaattttttatggggaatcagaatgtaggaaatgtattgaaacttagcctatacattggttgacacccaggaaaactactgttagagtgttctagaataggttaggcctggcagatgctcctttagtgaattcgaggatggatacctgtagtgagatgaggtagagaggcagcacagggattggaggatcagcatcacccatgactctgctgataacttgtctaggaagacagctgctctgcagtcagacatgaaccactgcagcgctttagtgaggccacctgaggatgtttttcaatctatattttatatcatatagaaagtgaacagggacaagctaaatgaaactgccacactgaaggagaagctatgccgttggttctgaaggctatcagaattttactgcgtatttatgatttacagctttcaaaaaattgagccccttagtgaacatcaaagcataaatcactggaggaatcagaggaatccagagctgagagtcttacagtttccccactgtctgcaagtctaatagtgcacagacaccagtctgctcagcttctgaagagaacagcaaatgctgtgctgtgtcttccccaggtaggggagacacactaatgaaggacccacgctactcacatttccactaaaagccccaatttccctttgtaatgtctgagagctaagacctacaactgcactgcagtgtagaaatatatgagctgtgaaaaagcagttcttggcaaattgtggtgcaccctctctctttaatatgctaaaggtcacctgaatgcacaaatcagagttttagaaagttacctcttcctaccgcctgttttctgtgtggaaacctatcacctttgaatgcaggtccactggatgggtacgtcttgctctgcttagacctctagatggaacagtacccagcaaaaacagttgtattaagcatctagaattcgtttcctaatgcaagtgctgggagccagagccaagtgcagttcagtcctgcttccctatggagcagagactgatgaacatgacatgaggtttcctaagacaacatatgcaggcaacctgcttacagcaagtttttctcaagctttgccatctccctttatttggtaagttcaaagcagctattagtaaaatcatccaactgtgacctgcagtagaatacagaaagctgtgtgcaggggtgatggtggtagttaaaacctcaggtaggcaatgagaggattatttaagcatgtcaggtatgtccttttaaacttgattcctattactaaggcatggaactttgtatacacacctaattaaatgaaaccacacttattaaaccacattatttgaaagtatactgcacatagaaaccctgctctattaatatttactattagtggaatctggtatggggagaaatggggttgacatatacattgttgttgttattgtcgttatagttcatattattattgtcatttgttggataagaaatcacaaggtatcatgagatgtaagaatggcataaccaaagtcaaaaatccaaacaaagaacaattcttaaaaataccaacaatgtgcatttgctctttaaagatctatagcaagtcaacagcttctcaagttcctgccttggtggggatctataatcagtgcatcttgaaaggacaggcaaatgagtctttgttgtacctccagctatgatattctagactgtttcttcttcactggcccttaaacactttctgttcatagtatgcactcttctaaaccctgtaaggagatgaatatgagcatcaggaagcctatgtggagtgtgtgttgatgcatgcttgagaaattgttgtgttctggcaagccatgtgccaggagagcaaagcaggctccagcagaaaaattccagctacagagcaaaagttagatgatctgagcttgagtaaaaaataaggatgatggcccggctttggtggcacacgcctttaatcccagcacttgggagtcagagccaggtggatctctgtgagtttgaggccagcctggtctccagagccagtgccaggaaaggctccaaagctacacagagaaaccctgtctcgaaaaaccaaaaaaaaaaaaaaaaatgggatgatggtataccagttcccctaagatattaagatatctttagatagataattctcaaaaatctaaaagtatggctcatgtatattccccaattataccattccctggcactgccaaaagactcaataacccactccacagatatttgctcagcaccctatttaccaaagctaggaaacagaaagaacctacatatgcttcagctgctgaatggatgatgaaaatgtgccacatatacacaatgggattctattcacatgtaaagaataatataatcctgacgtttgcaaacaaatagatgaaactttaccgggggaggtaatccagactccaaaagacaaatacctcgcatactttcttatttgagtatcttaactcagaagccttagatgtgagtatttacttgagtattgtatttactcaagaaatcaggaaagtataaaaggatgatggtgggggggtgttctagtatagggtctggtaggtggaaggtgctatggagagagaaatgggagggagagtggagagtttatctacagaggggaagtgggaagggcaacactgaaagacccagtaaggagggagaaagagcattaagcatgacttaaaaagccatggggaaattataattgtatcattgcttatataacatattacatataatgattatgagtatactacatatgtaaattataaagatagactataaattattaaaagaagttatactcgttggggtgataatcctcatctccaagaataacagactatttaggcatgtgacacttcccttcaagttgttgtccaggagtatccaagagactcctcaaataatataagctattggcatcgcctttggcttcctcccagaagttgaaaataagatcttattactgaaaatatcatatactatgtatataggactcggcaaaattgcacaggaattgacctggaaggctcttgcctgaggactagctctcatagtatgggaagttgctatacaagctgccaagggaggaaagaaatcaacagtcctaaccagctgtaaagcctaaaaccacaatgaccagcatgtcaagatatccgtaaaggtgcaatagacacttatatcctggaagtaggtaacagtcatcaaattgaacttaaggtgcaatagagacacttatatcctggaagtaagtgccagccatctagttgaacttaagatccactcaataggagggaattcatacctggtaccataaacacagccaaattcccatggctggtgaggtcatggactctaaaggaggtcttaatactgccactttcattgcccagtataatttccagctgaattctagatagctatccttatagtcacagataagtgtacctcttaaccacatcaaagagacttggtttgcagcaaatggagactaccacagctagtcagaaatgtagagaacaactaatagtcccaactaatagatacctctacaatacaggctctacctctaaagttcagagaacttcttggaggcatgggattgaaaagattctaagagccagaggaccaggataacttcttctctgcaagacagggaactgtactcattacatagtaacaatatggttatataagaaagacctgcacagtgacaacataagttgacatgccaaagtagatgtgggaaatttcacaaggctacacacttaactgaagagctatagggtgattaatgaatattgagaaatggaagggagaattggtcttctccagggataatccccctaatagtaacccaactccaagtggttagcctttaacatatatccatatgagcagcactaaatgtactcggcaggttgtatctaactccctctccctctctcccccctcccagtctctctgtctataacaataacaaattaaagtgatcgtgaattgagagaaagtaggagtacacaggtggagttggatgggacagaatgtggtgtggggctgatataatacagtactgtatataaaactctcaaaactaaatatagtaaaataaatgtcaaaagaagaaaatgaaatgagtgaatgcaggcaaagtatcagactaaacagtagcacagcagtgacattttctgtttgccttgatcaaccctttaactagcactcccacaggacaacaacctcctcttaactctattcctgtccaactcacaaatcctcctacttaaattttaaaataattataaggctggtaatgagcaatgtcttggccaaaagtagaaagtgtggaaaagagtgcaacctgcaaactcaacaagtctatatttttaacgaacactattctttttctagtgtcggaggggatacaatataacataggataacagtttataatcatcaaattgactatcagagaagtgataatgtatagacaaaggatttaagacattgcaaaaaatggttatattcaaatattgctttaagaaattgtaattgttagaaatcctttctctctgttttgctctgtgtatctatctctctgactctgtctctctctatgtgtctttctctgactctgtctcctctctctatgtctctctctctctctcacctctctcactttatctctagctctttacacacacacacacacacacacacacacacacacacacacacacacacaggggtgggggatggcaagtcttaattcatagtagtcccatatgccatgcctggggtccatctcacagacaggaacagcagtccaagaatgttttataacaactaaagcacaaaccaaaacaaaaataaaaaacccagaaaaaatgcaaaatgggtatgtagctcatagttagaatgcttgaatagcatatgtgaggccctaagttcaattatcagcatggaaaacagcaacaaataacagtatcaaaaccaaaactatcaagtcaaacaagaaaatcccacatactaaaatatttgtctaactgacaatacatgtgtttggtggaatataatgcagaaagttcaatctatactatttgatagaactggttccataatatagtgatcgaaaacaatactatactgaagtataatgagtctttttctttccttcatccagctcccaaaaaatgacacagagacttcttattaattatgaaagctcagcctatagcttaggtttgtttttaactagctcctataacttaacgaatttctgttgatttatattctgtcacaaactaaccatcctgctttgtccttgtctccttgtgtttctctggccttgattacctccttgtacttctctctgcttgcaagtctcagctatacctcctgcctcattattgggcactcagctctttattaaaacaatctcagcattatatcatcacacagtgtacaaatatcccataacacagaagaaataattctacttttggaaaaactgaaagagcaaaacatggtgtctacacatgtgtaggtaaataaatattggtctggtatcccttgtccaaaaatccaaaatcccaaatctataaaacctgaattttttcattgctgaaataattctacaagtgaaaaatccccatacttatgatgagttgcagccaaaattcagatacactaaaatcctacatagaattaacatgcaacacacacacacacacacacacacacacacacacacacacacacacacacacacacattgtttatgaagcacaaattttatatttaaacttgagtaaaatcctcaagttattgcattatgtttacataaatattccaactcctgaaaatgcctgaaagccttctgatataaaccactttgggtaggaaattctttacttatatatgaacacaatgtagtagacaatgggactcagtgggaagctgttatttacctacagtatatacaggagttgcaaaatataaaaaacacttgttagggaaattttaactaaataaacaggccacacaatatatatcaaaatctatataatgtatagggggttattattataaagaagccatacatttatattatgtacaaatttttatgtatgaatatacaagggatggtttcaagaattaccatccaggaactaatggcagttgaaataaagtgctcacatgtgtcttatttctgctttggtagagtaccttgcatcaatcctgtattatttatgtaatcaaagaaaagatattttattgtaataaaatgaagaagggaacaatgtctagacttctcattctatgagataaatgagtaaaggataaccttcacataccttttttagtattgtgttatagtaatctgttgtctattgggcacacctggggaaagagaatatcagttaaggaattgactccatcagattgacctgtgggcatgtctgtggagcattttcttaattgttaattggaatgtgagggtccaacctactgtaagctgtaccacactggtggtgcaatgctgggcaggttgtcctgagctgtataagaaagcaaattgagtgatcccaggagagtgagcccctaagcagcattctatggcagttaaggctggaggagacagaagctcattgctttgagtctgaggtttcatagagacaatgttcagtctgaggattcagtagagataagaactagtggctggctgctctccttttctgatctttcagcattaaaccctatatctgacctcaggtttttattattaaaaccagctagaattcatgctacatatggcaccaaggtgggccatgaattcacaaaaaagcagcttgcctgtgcctttgcagccttgaaacacactcatgcttctactgttttacagtagcagtcagcctcacatcttcatcaacatcataagcagatttgaaaagacaattgggaattcttaaaggggggatttagttaaaagagagtttttcccacattaaaaattggggaacagaattacaatggaggagttaaatctctatgtaattaggcatgcatgatttaaaattggaacaattaaatcaattaaatgaagggataaccaacttaactgggactgacataaagctaattagcatcttgataattcttggtttatctctaaaaatgttggttgatgtgagtgccatgatacagccttagaaaaacttattaaaacacatcatagagattttcaaacccagacagaggaatttaaggaagaaccaattttagcattacattataaggttagagaagaactgcctaaggttttcaaacaagcaaccttaatttatccagtcaccttgcaggaactggcaaatggcagatatccccaaggctgtttaatcactcactggaattctgaggaaatgttagatttaaagagattcaaggaagcaatattctcatatggcatgcattcatcttttgtgaagcagatgttaaacttgcggtcaacttgtaatagaattagccctgaagactggagagacttggttacagaagtcttagagcctggtcctcaattacaatgggaacctggtagaaagatgaggctaagaccattgaaccataaagtagggctagaggtatggaaatttcccaaaggaaacctcttcaattgagagactatgatgatgtactcatgcaatccctatatggtaaccatgccctagatttatgcttcactgatttcttacaaagattaacttcagtggtaaatagaatgaaaccaaattcagaagctcgacatataataatttaatctctggttttgaaaatgctaattctcaatgcaaaaggataattgggcctttaaaggcaagatcagtacccttggaggaatggatccaagatacaatcaatactgaatctcatgaccatgatgatgcttggataggagaggtgattcccagaggtttgaagaaaaattgaagtgtcaaatatttcaattgtggtaaacaaggtcacttaaaaagagattgtaaacagggaattcctagaaacaatgttttttctaagcataatccaaacagaacattcctccctctttattatgtagaaggtatggcaaaggtaggcattgaactaatgagtgtagatcaacaagggacagtcaaagtaacactttgccattggaaaactccttgaagggcctcttgcaggcccccatgtcaaattctgtccagtcattttctgtcattgtgtgggaaactccttcttcccaaagcagttaaagaacctaatgcctattgtaaaaaatacatagtgctctgtatgatagaagaattatagaagataacacaaaaatttcaggagaaatcattaataaaattgataaagattagattaagaacctccctaaagttaggattgggacaaggttttgttctcgtctttctaggaaacaaaacaaaacgccatcttgaggaatttaaagacctttggacatataagcatccaaagataaggtgagcactaatgggaaaaaaagaagaaaaggaatagtctgatgtaatgtaatctctggagcttccaaaccgatgattggaccccacaatgataaattccaccaggactatgacaacaccactaagatgacaaacacctaaagattggctttggactacaaagtgctcaggaccatttccagatggctggctgagatgatccagcctccatgacttgaggtaagtcctgtactttcccaatattcagagtctggacaacaaatgacacggctacctctcccaggacttgacaattaatccaaattttttctttataggattccctaaagatgttgttatccctaaagagcaggaagcaaatttaagaacaagaagcccatattcccaagaggtatggtgggtgtcttttggtagttcaatgggttatggatatttgtcattgtttagggtcgtgttgattacaagttgttattgttatcagattcagaattgaaattcattaaagaagtctgaagtgtattaggtaaagcagtattaaaagatagttttggcaatgcaatttaggatagaaggtgaacaaaaaacggtaaatgtgatattttgtttgtgctgttacaaatacagcttgcttgaagatcagagtgtggaactagccacactagttatccatagaggccaggtggcggtatcatgcacctttaattccagaacatgagatacagaggcagacagacttttgttagttcaaggccaccctgggctatataaaattgatccattctaaaagtgaaacagattcagtatacctgtaatcctagtacttgggagtcacacacctttaatctcaacagctaagagatggagacagaagtgatatggctgggtggagagaggaatgtaaggggggaggagacaggaggttattgcattgagtctgaggtttcatagagacagagttcggtctgagccttcaatctgagggttcctaaagacaggatcacccattgagtctgaggattcaggagaggtaagaactagtggctggctgctctgcttctaagatctttcagcattaatccctatatctgactcggggttttttattaaaaaccattagaatttgagctatacgcaatctctgcttcagttattgtctgagcttcccttaatgatagactttaattgtaaaccaaatcaaaccttccttccctctagttgattttagttagtgacttatcaaagctcaaaaagtagattgaaataaatttgtttcaaaaccagaaaaacattaggatgtgtttcagatgtaggtcaaatagccaactctattcatgaacaggatgccaactctgaggtagagttcatgaacaggatgtcaactctgaggtagagttcatgtacaggatgctgatgctgactctgagatagagttcatgtgcagggtgctgagcaggaagcttattagggatatgcatatctggggaagaaaggagagaaagcaggtatgggcagtgtgagaagcaagctcccctactgttataatgacagactcaaacactgctattgatagccctggagctataattggtcttcagtcttgtcttgagctgagacaagctggccaggatcttactactgctgccaggtgtagatggtctttatgtggatattcttgaggggagttgtatctcggaagtggctaaaggcaagaatggtctcataatggaaatgaagatatctgtgacctctggtcctttgtaaaagggaaattcatggatactgcatcccaatatcctccaaaatgcacccctaacactaatccaggaatgctggatgagcaggctgaatatagggtgtttgtcctcttcaaaatcatcacattatgagatcaattcaaggagaccgttccacaggctaatttattttataacagagctaggttcagtccctagaaaaaatgacagtcatggtggttcccatcactcttcagggagcttgtatggaagggaaatagctacacaacactactgctgatttatgaatgctcattacagattccgcatgatgctggcagagaaggttcatcttgatgtcaaagcataagtgttgttaaacaagctagccagatgaacaagctagctattctgcatttccaggtatagcagaacatgttctcaaagctccaggctgatgtgatgtcatggatgtgcatggaacaagagcttaaactacctagatcaaaatatctttcagccccttcttattcatggacttgaggcaaactgttttgcaggtatccatgtcagaggatcagcaggtggcaactgacttcagaaattgacccaccagcatggaaggcattaatgggcaaatcttggataggcaaggccccctagaacttcagccccagaatatctctgctactgctgtgtctttacatgtttgccactgccatttttctctggtatctggcatggtgtgaatgggccactgcctttaatgtaatgtagtgtgattatctcatggaaatattctgttctactgggcatttgtacctgtgaattattatgaagatgattttcttctaagctgtactgtttaactattaaaacaatgactttatacagtaatataattagtttaaataggattttgatgatttagggtctttaataaatacaataacggattatgatgaaggttagcttagtgggaaaagtaatacaggtaaaagcaagttatggtattgcctcccacctctgataaagcagaggatgcagaggacagaaaaaaagaacaaggaagtaccacatagctagtttctttttacgagtcatatagattgtgacttaggttaatgattaagaaaaacaactgagttccagaagcccaactatctcaagttcttttaatccttatgttgagagaagtgttcacaggtttgggtgtgcattacagctgacaaacagctttaaaatgacttaaagtaagattaagatgtttttattaatatctttgaggtgaaaaaacacaaagaaacaatttaaagtttagaaagtggaatagtagagtgagggccttgttaaggtcaaagaacaagaacaaagtagctcaattattatcagctgatgtgcctttcttgataggatgctttgctgatcaaagatgatgattaattccttgtgcccatttctgctctcagcttcctgatatcaaaaactgttgaagaatggatatgcaccacaaggatttaaagtagagatgattcatatatatgttcatatatatatatatatatatatatatatatatatataatgtttaggtttgtggttcttttaagattgcttataaaattaccttttgaggtaaatattaaactgattgatgagtttttgtaaccactaaatgcagccttccagtaaaaactaactgagaaaaatactttgcttacactctgttcatgtatagcaagttgcttggatatggaggtatgtgggttctcgggataatttgtttttcacctgtaatatctaaaatgtttaaccatgtaaggtctatgcaaaacatgttgttatttttttacttgcattcattgcggtcattcacttaaaaaataaaatgtaacatcattataatttgtatactgcatgaaagattttgccggtatttgtgagctgtaagggaaaaatgacgttagttagaaggaaaacatcaaaagagaaagaaagggtacagagggatagagataagaaaagaaagaaatgacagagaaaaaaaggtgatagaggaaccctaaaagtgtgtgtgtgtgtgtgtgtgtgtgtgtgtgtgtttggcaagtcacagagagttaagtttagcccctccacacacacaccagctcctgagaattaaattttacttcttcagagagaaaagtcaagtgggttgattagtcccccaactccattagatctccctcattccctgagctgctggaggctggttctcacagcagccatactgtttaaaatcatatgtaagggtggtgttgactgtcagcttgacagtatttcaaatcacctggagtaagggcctatgagcatgcctgtgagagatcatcttgagtttgcaaactgatgtaggaagacagatcttcatggtcacaggacagtttccttgctaaaggaccctggaacaaatggaatagagaaagtaagctaagcacaagcagccattgattgtgggtgccatatgaacagccactataagctcctgcagccttgagctcctcaacatgatgggttgtgccttgaactatgagctaaaataaatcctttctctctgaagatagtttggtcagactatttttgtcacagcaaaaaggaaagaagctaaagatgtatttctgcaagttatctgcaagtttactgtctgtgaaaaggagagactcaggtttgtttgttaaaaagaaaagagagcatgcagaacacagactaacagcagacactgtgacagagcaaggatgctatgttaagagttaactgctatgcaaactatggtataattgttgctatgttcctaagctgcagttcactcatccttgtattttctaatgagcttccccatataaccaatttcatgggacattgttgggcgatatatgaatctcagtggctcctcaggaaactcttggaaatatttgcatcatgagaaaaatagacaacctcttggtacatacaatattgcatcagacaaattaattaatgggattgtttgacaaatgtataggacaatgtgtggtaggggcttttagactactaccaagaactcatgagcaaagtcaagcagcatattacaatgcttagtgtaaatactactccttattcattttctcaagtggagtttgtagtcttgtggctgctcttactctgtgatcaacatcttggtgttattaaagatactgaattactattaaattcactgaatcttagaagcaactagaaatttccttttatctaagattccaaaaaatgatgattctctcatccctggaacctctgtggtccatctcctcactcataagagtaacccaactccttcctcaaccttctcctgtatttccccaacacatcagactagacagtcacagatgataaaaggggaatcatgcaaccaggagcttactgatagggtggaagaagagaacattaaaattatacagatggggtggtatcatgttaagaataattcctatcaatactaacacagtctggtattgactggtgtaaagatgtgtcagttttcattcattacttctttcacaatgtctgtgtgaataatgtcacagcaaaaaaggaaaataacatttaaactttattgtcaaaattgttttgaccacatgagtctactcagagtaaatgaagaaaaaccatctggcacacatggagaacttctgtactaaggtcttattcttattgttaattttggtttggggatggatgtgtgatacaattcttagaagtgtgactggaatggaaaaaaacccctgtgaggcatttctgagcaagcaggatactcagtagctttgccatgtgtgtcatgattcctggtatgctagaggtatctgacgatcttgataggcataacccatcatatgaagtggtggtgtagagaaaaaagaggacctgcaatcttgatgagattatagagccactgatcaaaacattcctgagataaatgatgtctttaatttttgggagtacttgaaattttcttttgtgtgaacacataaagaaaacaatgtggacacccacctttgtgtaaagtaatatggaatttggggcaggacaggaagagtaggaggtgggattttggtgatccatgggcagagtagaataggcactaaagagtctatagtatttgattaaacctgattcaaggtgagtattgattatttagacataaaaagtagaaatagattagatacagatacaggttcttcagagtttcctagagatatgtgacttagtgtctaattaccttcattacagattataagtcagtcattctcttttatccttttttttcacattttaaagatccaaagccagagcatttctgaagatactgcctgtcactgtggtttcaatgacaactattgaacatgaattctgcaggatgcaggctgtagaatcatagaaatactatgagtaagaggtagaaatgttgatggcctttgagaagggatttaactttgggtatagtcagattttccatagaagggcaaccttggaatgcataggggttgtctgtgggcactgaaagaacctttgactaaaagtaagtcaggcatggcagcactaagtactgactacttcattccactctctagtataatagggtctgcttcaataacaaaccccaaaggctcagcagttttgaacaaatactcataggaaatctatagaaaattagagtattttcctaaatctattaagagcattgattcttaccctgtggttcactatccctttgggagttaaatgacccttttacaggggtcacacatcagatatcatgcctatctgatatttacattatgactcataatagtagcaaaattacattatgaagtagcagtaaaaggttgggggtcaccacaacatgatgggggactgtattaaagcattgtagcattagaaacagagaacctctggtttcaaagtgtactctatttttcaggctactgtcttagcctaatggttgcacactggttttaaaagacttagccttgaagataacttagattgcttcccccttttatttgcatagcttcaacttttcaaggatcctgtatttagatacagatgactagggattttaatctacctatgatagagaagggcaaaggatatggtggaagaaaaatactctgtattgtgattgccatttaaaccaccaactatatattaatattatacacttgaagaacatatttgatcactttgttaagattcctcaaattgtaattcccaactgcatcctttgcatagatcaaggtcttcaactaatgtagaagagagtatgtaccactatgtatctatgtggcacattttgaactaaaagggaaaatttattttgccccatctctctactatgtggatggattagttacaaaaattatctaataaactgaaactctggaaaagataaagagtaggagaagttcatctataaaattacagcaggcctgagtgttttttattaatatttcaatgtatgcaactgcttagccatcctggaaacctgtggtggtccaggaaggaaagaagaataagagttggtgatgtgcaataaaactactttggatgtggaaagtagtttcaagtccaaagacaaactttgtcataaaccataggacttttgtattggtggtattcaaataatacacgtctttttgttagttttagatattttccttgtgtataccctaagaatctacctcttttgctcatatgaggagaggatatggagaacattggaatgatgatatttgagttcatgtctttctgcagcttacctaggactggtgccagtaaccaaattatctccatctctgggagggcagctacctttagaccatgtcaggggtggatctgtagatggaaaaacaatgaagatgagggcaaaggatccttagaggagtcagtgtgcatgtgttctgagcacagtgtaatgccattattccttggggagccagcccaagtgaccactgagatttcatttttttttctagagtagccaaaaacaggtgattatatttattactttgtaaactatacaaatgcataacatattctatttcatatatgtgatatatttaaaaaatttagcaaaaaatgcaatgaagtctgcctttggcatcagggtaaggatatattttgaggtccccttcagagtgggactttctgcttttgagggcatgaaaggcaaaattcagagaatgtatttttagatatttcttttatttttgagattataatgcattattatcaccttcccctttctccctccaaagtttcccatcgacccctcctgctctctttcaaattcatggcctctgtttttcattaattgttgttaggtacacttatgtgtatgtatgcacatacatattcttaaatgcataaatacaacctgctcagtctgtataatgttacttgtatgcatgttttcagagaacacagtctttaaaatatttatagtacttgaagttactttataatctcttagtgaaccaggagtcagttccttgtaacaagtcagggcaaggctcttgggggatcttgaggcacatgtgactgctcccttgattggtctagatgagtgccacatgactgatcatgtttttttttttttttttttttttttgggcccaggaagcatacatagagtgtgtggacttctgagtgctagggtccacgatgctctcaaaaactaaccaatctcagtaaaggtttatttctatttccatctattttctgccataaaaccctatcccaccctcaaaaagccaccaagtggcatatcactttcacaagttcttctgtccttttcttaatgaatcttcatttgctctgtttgctcactatctgcattttctttttcttcttggctacaccactttcaaagaatccacattatgaggacagccaggcttggtgtcagataactctgaatcccacaccagaaaaaaagatatcctctaatatttatgaaaaatgcatttaaatgtttgaagtaaagagtatatttagtgtctttagcaacaggagcattcttaatgaacagtgtggcagatttattaagttgattattttttccaattatgcttgctgaaaaagcatgtttatgtgagaccaggattccccagaataattaatcagagcttgccagcaacttaaccaagtattggaaggaagcctgatttcatttaatcctacattttctgcatagaaagtaaataagtgaaatcttccatggctggtggaaggggccaaggacaaaatagaacttgccagacaccgactcttgtttcttcattgtcttcctaaggaacacaactccaagatgccgctctgaattgataatgttctatgcatatcctccagccacagaggctggcaggtaagaatgcagtagagccatctaatcctcattttatatatgtataatatgtctttattatagtatttttccttttacaattttttcttacataatatatcctcattattcctcccagttctcccttacctcctcactcactcagatccactcttttctgtctctcattagaaaattataaacttctaagagatattaaaatataacaaaacaaaatataatacaatgaaacaaaaactatcagagcaaagttggacagggcaaaccaacagagggaagagagggtataagaatcagagacccatttgttcacacacccaggaatcccatcaaaactaaatcattctgatacatctcctttacagatgacagtgacacttcaaagtagtaattttcacctacttacaatgttaatttttaaatattaattttggggttgagataaagtgaatatagttctaaatatgagcaaggtttgcaggccacagatttgctactgagctttcacagaggttaaccatggattcctgaagctatagaataaatcctaaaacaccctgaacagcattattgaactatgagtccctgtaggtcattcttgattggccattttaagacatatacataaaaatggcctggtttatggactctgagacaatttcatgaaatgcttcatctgcactgtactaatttgaatgctaaaatgctgctatgctccagtgtgtaattgattctcagtaaaaaatcagttgcaacactggaaacaacagagtagagccatttattccttctgctataatcaaaagcaggctgtagagctcaggacggaattaaacatgggccacttcaaaagcaggttatgtgactccctgaatcccaggacatgtggagatgggcatgattgtttgaatgcattggaccccaccctgactcactgagcatggagttcagagttcttcacctatgtcaactcttccaaggattctgacacaagagccacagaacacctccaggtccagcaatatctcaggctcagaccagagcattacaatctgtattcaacaaagtagtataacatatcaagcatatgctacctattaagagcaatgttgcacaaagttacacctgagctttaaggactgaatgtcagtgtgagagactaatgtgtcaggtgctttttcaggagacttggcaaagccctttaatgtaaactgttccttctgcaaagtaataatactagggttcagaatactttccgaaggcaggcggtacttgacatcatatagggatgctagtaaccctgtttggatgacattggtttgttcgtgttcctggtatacatgatgtactcacaaaattattcttgataataataacagtgataatggtaattatcattgatgttaaatgttcaacttcattctgtatgtacaaccatcctgtgagctgatatctttatgtccattttataaatgaagtgttgtcaaaaaggtcaactggattgctcatgataacactgctggtttgttgcagacataagggtgaaatttaagagtggagttgtggggggctcaaaaaaaaaacagtctccctgagatattaagagacttatccaaagaccaacatataactctccctgatctgtgcattctgaaatactgtgtttacctcacattgagggggacgaacagagggaatagaagagaccaggctgttctcagatacacataagaactaacatttataaataatttgccacatacataaaagcatcacattattaaggctttaaggatgtattaaagcaatgctagcattagattttataaattaaaatttgccatttttacacagtttactaatctttttaaaacacaaatagaaccactgagccctgtcagatcatttttctcgatccctttaaactgaaactatcttatgttcacccagaatacttctataaacccagataatgtcaactcctaagggtggtcccagaaagctctgtgtttgcctggtcttctatatcagaatacctaaggaaggcaccaaggacaaattcacgtttgttccatgggctgattattccacatagtcacactccttgccttagccagtttgtctaattgacattctgaaaccccaattgtattgcagatctaattaaagacaggaaatatttgtttctataaagcaaggcattctcctagagatggggaagaataaattgataccttatgatattaaagactggggaaataactagtgcattcagtagttttagtggggtatgtcctcagttatcccatagcctgtgaggcatctgcctggagacatcaagtgcaaataaatgtaagtaaacatgaatgggggggggctggaaatgtcctgaggtaaatgaggtattttttcatttctgcctttttccccctttactttttacagcaaatggaaaaaccctctttttgcaatctagatttacattttaaattttaagatgtcagcaaaatgagacgtatatttgagggtgattttcattatgctatgaatgcataattcataaaaacctacagcttacgtaataccagaaaacaagtgaataaattgtgagaagaaaattgaatcttatatagtatcttatattttaaaactttaattttgaatttgaaattaaaatgtgatataaaatggacatcaaattgttacaatgaaaatattagtaattatagcatggaaaataactagttttcacaaattatgtaattgatttttgctttatgaagtgaaaaactgtcaaaatttattattataacatatgatcttattttgtgggcatttactgtactcatcaacataaaattttcatttgtcaaggaagtagctctcacaagccccatgaaagctaagttcccattactctcagctagtccttacatggtggagattaaatgagtcttgcaacaaatatctttgaatgcctactatggaactattcaggaaaacaggaataaaaataaagtagtgaataaaacagaaaagaatctttaacttcatagagctaaaggacagacagtagttcagtagcagtagttcagtagcagacaatacatatcatgaggtaaaatatgacagataataggagggatgtagcaggtgtaactaaaagtaaaataggtagggaaagcctcacagtaagataaaggatttgagaaagaaaagaccatttagacaaaaggtaatttgaacaaagtctgtggcaggtacattggcctggaggcagcatttttttatcatttttatttaaattctttaattactacttatatttacatatccattcccccattctctcaccctcccatcctcccatgttccccccaaccccctaacccatcccccaactcctccccagggatagtgaggccctccaccagggaccttcaaagtctgtcatatcatttaggggagggcctaggccctctttgctctatctgggcaatagtatccctccatagggaatgagctcccaaagtccatttgtgttctagggttaaagactggttccactgttagaggtcccatacatagactgccttagcctcctagctggcacccacattcagagagcttggtttggtccaatgctgtttccccagctttatgactagtgtctccatgctctcactagttaaggtcaactgtttctgtgggtttctgcagcactgtcttggctcctttgctcatccctcctccctctctacagctgggttccaggagtatggtttagagcttagctgtgggtgcctgtttctgcttcaaatagctactggatgaaggcttatgtttttatttttgtgactaaattacctcattaaagatggtttcttctagttccattcatttgcctgcaaattagcctaggaaacttattgtttgaattggcaatgtcccccaaagtcttacatgataggagttgacctctgaataccagctgatagactttgagaaaattaatttatcctagatactgtgatttaaccaactaattaatcctttgatggatttatactatgatgactgcatcagttaggtatggaaagatgttgggatctattggacagaagtaggctatgatgggcatgaaaggaagagtttgcatgtctccttgcctctcttcacttcttaattcctgtctatcatgaggtgggcatctttgttctctatacctttctatcttgatgttcttttgttgtgggatttctgcctgggcccatcaccactttagcccccaaaataactcatgaagactccattagttatgatactgttggccaatgtctagggcttctcattgggtagctctatcttaagtattaacccataactactaatatatatttttacaaggtcttatcttacggggaacaccaaacttgtgtgtcctctcctccagggatcacttggcaactcctgtttactacatttcccagaattctccttgtccccttgatggggaaagtacttctgtgtatgtttatcttattgactgtttaataaagctctgtttggccaatgaaacagcaagttagacaggactaggagtcaaagaggattctggaaaaatgtagtagagaagtggtgatccaggcaggaagtgacatagcaaggagactctaagaaaggagaaacaggaagtgtcccttttcctcttcctcctccagtggcacaatgtgatccaccggcaaggagggacgccaataaggcatccaataagataagtcttataaaatatataatttatgataattgagactgagctaacagatgagaatcctagtcattggccaagcagcattgtacctaatacaagtctctctgtgcattaattggggccctaaatcaggtgagcggctggcatacagtgcccacatggcagtggggctagagcagcttttgtggaaagatctatcgtaggaggaaacagcttcctgaacattacacctgtagcacagacactgagatcaacaattaataaatgggacctcctcaaaattagaagcttctgtaaggcaaaggacacagtcaacaagacaaaatggcagcccacagattgggaaatatattcaccaaccccctatctgacagagggctgattgccaaaatttacaaagaactcttagggtcctcctggtttactagcttctctggcagtgcaaattgtaggctggtaatcctttactctatgtctaaaatccacatatgagtgattacataccatgtttgtctgacatacatggacctctagagaaggggaaagggacaagatctcctgggcaaattgggagcaggggaggagtgggggagggagctaggagaatgagaagggggaagaggaggggtgaggaggacatgagggaacagaaaggttgagtcaggggtagaatagaagaaaacaagaaagaagataacataatagaaggagacattttaggtttatagagaaatcaggcactaggaaaatgtctgcagatctacaaagatgacaccaactaacaatctaagcaacagagaagaatttaatttaaatgccctcccctaataattattttgatgactgacttatatgccattctatagccatcatccagcagctggtggaagtagaagcagacacccacaactaatcactgaactgaactggatccagttacagagaaggagtgatgagcaaaggagtccagaccagcctggtgaaacccacagaaacagctgacctgaacaatggggtcctcttggtccccagactgatagctgggaaaccagcctgggactgatccataccccaggaacatgggtttcagtgagaagaccttggaaatctatgggtcctcctgtagtagatcggtacttatccctagcataggtctggacttttggagctcatttcacacagagggatactccctgagccaagacacatcggggtgggcctaggccctatcccaaaggatatgatagactctgacgaacccctatggaaggtctcaccctccctggggagcagaaaggatatgtaataggtagtggtttagttgggaggggtggtaggtgaggaggggagggacagggaactgggattgacatgtaaaacaatcttgtttctaattcaaatgaaaaaatctgcaaaaataaaatttacaaagaactcaaaaagctagtttccaaaacacctaataatccaattaaaaagtggggtatagaaataaatatagagaattctcaacagaggaatctaaaatggctgaaaggcacatacaaaagtgctcaacacccttgtcatcagggaaatgcaaatcaaaacaactctgagatatcatcttactccagtcagaatggctaaagtaaaaaacaccaatgataacttaagctggagagggtgcagagaaaggggaacactccttcattactggtgggagtgcaaacttgtgcagccactttggaaatcagtatggcaattcctcaggaaaatgggaatcagcctaccacaagatccagcaaattcactcttaggcatataccccaaagaagcactttcataccacaaggacatttgatcaactatgttcttagtagcattatttgtaatagtcagaacctggaagcaacttagatgcccctcaactgaagatttaaagaaaatattgtatcatctatccaactgtgtgactctaaagtcttgcatgtaacttaacttttgtcataactaaggaaaaccagaaccataactctctgtcttcaactccatcaaagaccacagaaagacagtatgttccagaattgacagagacatctcactacctggacagtcacaaaaagttcctctgtaacgttggagcatccatcttcagcccatatgccataatgtgtccggcagacttgtcagcaaagcaagaaatttgaaactgtcccatctgtattggcagtttaccagtcaattttctctgtgtcctgcagaatgtctagcagactctttcatgaagcaggatcccttcagcactgttcatcttgttttgcaagttcagcagtcactttcctgtgggtcctgcatgtccagtttaccaaacagtccaggcaagagcagtttcttgaccaaaaggcttatcttgctatgttgaaggcaaacgccatattgagtttcttcaatggccatcctccttcctgacataattggtgtgccaggagcagttgtgtctcactgtcacgaaaaaccctaaaccattttaaatgacatattctgaagatctttgaaaggtttgaagaatatccatttcaagtatatctttgcatatctagaaaacctaactaatctaactgtaggttttgactattataggtgactatatacaatttgtatttaattttgcattacattttaaaatatccatataaacacaatacctaatcaaaaggagaaatatacatataacaaaattgaccttaagtttgtatcaataaatgaaaatccatttcaagagaaaatatttatttctataccataacctccatttaaccttaaaaagagattggtagtgatcattaaccatttataaccaacaccatttaaatgaaaacaaaaaattaaaaacaatatttgggaatttgagtattgttcattccaaactgtttcctgctggttgggggcgctgtccataccatgtggatcaggaaaaaatacagaaacctgtccaggttcttgtttttgtagtctgtaaggctataccatctcagctgttttagaagttggatcacctgggacaatgtttcagggggtcttgcttcatcaaaccatattagtctggaaggaatccgtagcttaacattttttgtgcaaacataagtaacctgtccttatacttaaattttgaagtcaaagcatttttgaaatatataagttggtttaatccagtagcatttctcttagaagttgttgctatttcctcatcagtccaacaatttgaagacaacacaatagcatacagtatccaaactctctgtacttttcatctttacatggctttttttattacattatttcttttactttatttttttcttttatgagacagggtttctctgtgtaactttggctgccctggaattcactctgtacatgaagctggccttgaagtcactgagatctgcttgtctctgcctcctgagtattgggattaaagtcatatgccaccatacccaggtactctattttttttatttttctctcaagcttatgaatatttttccttactgtaaatctttatctttctgtaaccacaagagtctatctgttcactaacaggtggtttgggccacttatgcaaatgagtaagttgctcttaaaggaattgtggtgtgtctctcaatgcctggaaaacagagctcacccaagaaaatgttgctatcaagaagctgtttatgtctttgctgcacctttagaagttgcacacctgcttttcctgtctaccctagtattgttatcttccttctcagctctttgatgaggctgaagattagactgtcacaattattgttctctctccccagatagaaatattaggtccaagacttatactttccagcttaggacatctctataataatctctgttacacgtttaccctaggacaagctatgtagttctgtcatttgctattgttgctttactggctataaatcttgagggtatatgttcttactttttcttctcctagtgcatacttgaaatttgccatctttgtatatagttttgtatcaagtctaaatttttctttagactaaaaggggaattgtagggagagatcttactaggtacctgtggcactgaccatgcctgtttgggcatggccataggtacgtatgtggtgtgtgggatttagccctgaggagaatacaggctcactctctcatggttacagtctggtctcagagggctgctgagactgaatgctgggagcactgacccagagttatcggtttctcatgtaagtgatttgtcccaataaaattaacctatatcacccctatcccatgtatggtaattttattccaacactcttctttaaagcccagaaccaacagacccactgaccataggccgactatgactatgtttttctcaggtatttcacagtaattagaaactaatacaggtacaacagagtaagaatggtcagcatagtgaaacagagcattcagaggtgagagtgtgggagcagggaactggtgtcctgatagtcattgaaatcataccagcatttaacagaaaggagatagaaagtattcataggactcagagaacaacaatatcttgttatgcctcaaaacttatgttctgtcatagagcaaatggcaaacaggctgagaaagaaatcaatgaaacaacacccttcacaatagccacaaataatataaaatatcttggagcaactctatccaagaaagtaaaagacttgtatgacaataacttcaagtcttcaaagaatgaaaatgaataagatatcagaaaatggaaaaatctccgatgctcatggatcagtaggattaacagcaaatatggccattttaccaaaaacaatatacagactcaatgcattccctatcaaaattccaacacaattcctttaaagacctcaaaaggacaatattcagcttcctatggaaaagcaaaacaaaaccaaaaaaatcctgtacaataaaagcacttccagaggtatcaacattcctgatttcaagctgtactataaatggtggtttctctcccactcactacttcccaaataaagacccagagccttaatattaattgaaattatttggcaaatgactcaggcatattactgattagctttcacaattaaattaacccatttttactaatctgtgtatcaccacatggctgtgacttaccagtaatgttctggcatcttaccccttcaatggctacatggtatctctctgactctaccttctttctatccatatctctgtttgaatttcccacctagctatattatgccttgccataggccaaaacagcatacaaaagggcatcccccaccaagaaatgcaaatcaaaactgctttgagatttcatcttacacatgtcagaatggctaggatcaaaaacataagtgacagctcatgctggcaaggattctgaacaaggagaacactcctctattacattggaagtgaaaacttgtacagaaactttggaaatcaatatggcatcttttcataaaattgggaattgaccttactcaagacccagctatgccactcctggggatatgcccaaaggatactttatcctaccacaagaacacttgctcaattatgttcatagaagctttattcacagtacccagaaactggaaataacctagacacccctcaactgaagaacagataaagaaaatgatgtatacttatgcaatgtagtattattcagctgttaaaaaattgacatcatgaaatttacaggcaaatggatggaaccagataaaatcatcctgagtaaggtaaccaagaacaagaaagacaaacatgttatgtaatcacttataggtggggattaactttaaagtaaaaaaaaaaaattaccatgctataattcacagactcaaaggagctaaataacaagaagagctcaaggggagacacatggatctctctggaaagggtaaatagaacagatttcttaggtggactgggtgtggatggggatgggatcaggtgggggaggtggagggagagagcactggaattggggaggcatttcaggggtaaggtagaaacctaatacaatggaaaatccctggattctattagggtgacactaggaagacttctagtcatatgcaatacggaccctgaactggccatcttttgtaactaggcaaggcctttggtagaagaactggggcaccaatccagctacaaagccttcagtctcctgtagtgatagctgtgtttacactccaacaaataaagcttgcctgaatatcagagggcagagctaaccactagttaaccatagaggtctggaagtctgtacagatagacagaaagtgataaggcaggaaggtacaagcgctcagtctcttttctgctgagaagttgagtagacaatgtaactatggcttacttcgttgtttctctgatctctcagaattttcccctatatttgactccagacttttggtattaagacatattagaactcatgctacatattggcacctaacatggggcatgagcctacaccctgagactgggtgtctcatgctattaagacctactagaactcatgctacagtctacaatttgtcctgccttcaagctgtgctgtaggaaaagaggtgcagaacttgtgagggtggacaacaaatgactggtccaacttgagactcacagcacaagagggagcctatgtcggacactgcctggagggtcaggaaccagagactgaatagcccagagacctagagacctaggatagcacggaatatgagtggcaaaaaggtcaatgatacctaatgatgttttgctatacttgtagactggatcctaatcatcatcagagaaatttcatccagcaacttataggcagagacccacagtcaaacatcaggatgagctctagggatccagtagaagaggggattgtaggagccagaggggtcaaggattccacaataacatgacccacaaaatcaagtaaccatggcttaaaggggctcacagagactgaagcaaaaatcagggagcctgtataggtctgacctatgttctctctatatatgtcatggttatatagcttggtactcttgtgaaactcttaatagttggagtgggggctgtttctgatacttttgcctgattcgggatcatttcctctgattgggttgcctcctccagccttgatatgaagatatgtccctattcttattgtaacttgttatgccatgtttggttgatacattttggaggctttctcttttatgaagggaaatgtaaaagggagagaggaggtggtggggaggaacttggaggaaaggaggaagaggaaactgtggttgggatgtagtatatgagagaaaaaaaatcagcttatcatggacagtactggagaccaggacttccttaagagataaaaaaggagaactatcttgatagctgtgcaggaagaaggagagtagtgactaaacactaaatccagaacccttgactccagctggcctcaagcctccaccaaggcagaaaaccaagaacactgtagtgtggatggagacaagccacttgaagtggcttggcttggtatggtatcttctcggaaatgtatgggcagcctctccaaagttcatactattttagtagttctgctgttacttttatttgagttgagtagagaacattttgaaataaatgtaaatgaattttgagtgagaagatgctgcctcctcctttccaagctatcgttgcagccccactggccaccttgcaatagcttgagcatgccaaggatttccccagctcatgtcttcagtacaccctctgctttgtccttaaaatgaacttacaaccaaccacaagccacttttctaacttttcacttcttatacttcatgtttcaaggtgaaaggagtcccttagaaggcgttctgaggactacattggggtaatttttgtcaccgctcttttatttacctctataggcaatattaagattcacaaaagctcattcataggtttctgctgttacttcctgatgttatctatcaaaatgctatgtattcaatgagtcttctcaaagttcaggtgctagaaccctagctcaaggcagtaataggagatggagcataatggagggagtgcggatggtgcaagtaaaacctcattctcttctctcaagggttcatggacagtcctcttggaagtgactgggctgtaaaagtgagtgattcttcatatagtgttttctaccatgtactgagctatcattgaaaatctttctgaggcattgttgagacactgttactatgcattttgatttgctagtactcagaatcataaaccagaaatactatttcttttaaagttacccaacctgtaatagtctataatcacagaaaattgaatgatatacataataagcaccacaagtatacaatgaatatgtcttattaactgtgttgttccatgagtatctagcatatcataatactctgtagatatttaatgaaaataaatcaatgaatgaatgagcaaatgaattaataggagtatcttggatagtaaaagaagtatttttgtaattgtttaatgtcaaaactactgtactaacaagaaatcctgagacccagacaatatttcagtttcaagcacaagcctggcagacttagtctcatgtcaatcatctttctgagacctatacattttttcttttatataatttcttttttatttaaataagtaacaagcttgtttcacatgtcaatcccagctgcctctccgtcctcctcccccatccctcaccagcctccccaagccctcactcccccctgtgctcccaagggaggttgaggccctccatgggggaatctccaaagtctgtcatatcatcccaggcagggccgagagcctccccaatgtgtccaagctgagagagcatccccttcatgtggaatgggctcccaaagtccattcatgcaccagggataaatactgatctactacccaaggtcccatagcttgcccaaggcctcctcactgacacccatgttcagtgggggtctggatcagttgtatgctggcctatacattttaattaaaatgtatttatatttttacatcacttcctccactcccttttccctctccagcccctcccatgttcctttcctctaaactcctccttgccccttctgctttactcccaactgatggcctttttcctttttaagtttgattgttattgttacacacacacagaacaccccaaaacatacacacatttgcatagatatataaaaacaacatgccgcttttgttgtttgtgtgagtatggtttcagggttgaccattttgtcttatattgaacattcctctactgtgtcatctgagtgacttcacaccttttctttcaggatacattcattgtgtccttaccatcatatgcactaaacactgtaaaacataagttgcttaatgacaagaataaattattagaaatttatcattaggcaacttcattatggtggaaacatggtagtatatacttacaatacaggagaatctggcaaccatattggttcatgataggatttcatggtcacttcacttgaatttgctatgcatttgttgatttaaatgttatacaacatatgacaaaattcatactgttcaaggaattcctccagtactgaattatagttccattgaagacagtgacctagatttgttatctgtggtaggtgtctcactgtgtagcctagactggcttggaatttgcggtccttcttcctcaacctccaagttctgagatcacaggcatgtgttagtatgcctagataatggtaattttatttgaccaagagtaggtattgtatggtgtacagctgaggcttagataattttggggggaatagataattatcaattttgtacctgctgtgtaccaatagttctggtaattggcagcaacagatttttagctttattatatgggcagtgaacaaatggtaagaattcttcttggactgagactcagtttcttcagatccagttatctcatgacattttttcttctcaaagggcaagtttagatgaattaaattgatttaaaaaccatcaagtgaacaaagtgacatacactgagacagtcctgggagttggagtttcctctctgctactgtagctcctgctcattagagtaagactggtttcacagcagtgaccaacatagttgatttttaaataaggacttaattttcaacacttcaatctacttttctagacattatttgacatagcagaaggttgatattctaaatagtaagattatactgagcattctaaaattacttctgaaccacagtatgtgatacatcaaacatgcattagctcagctgtaacaactcacaaaacttgtttgtctcttgttataaaagtagacatgtcactggcatcatggtataacagaaggagctcctttatataagttaattaactgtcaattaacagttacaaataatgtatactgactggtagtaatataaggctagttttttacatcaccaccaagattaagtcattgtaaagtgaactcataaactatccctttaaaatattatactctaaacagatgaaactaaagctagaggaataattatcactaactagtaaagtctatattcaagccacatctacctgatttcagataccttgagatttttttctacatcaagcttttctgcaatgaatagatatggatgggtggatgaatggatggatgggcagacagaccattggaacagatgggtatatggatggataagtataagaaggaactatacccgtatacatgggcaacatttgattaggtgggtgtaattctatgctttactttgttcataacttttatgtaggctttttaaaacaatgctatgcctatttagtggaattatattattattttgaaaatatatcaaaaatgtcttttgtcacacaaaatattacatacaattactaaataattttacatggctgtacatgcccatgtaattatagtattggggtgattaaggcaggaggattgctacaagctcaaagttaacctaggctgagtagcaaaaccctatcttgaaacaaaaacataggagcttttacctagttagatttcaccttcacatagtggaaatctctaacacttggcccttcttctaatgatgcatccagaacagagctatgaatgcattgacagcttatttaaacttattgaaggctcacagctttcaagatttaggacttagctgacatctgcttagtgcaacagtataatgtgaaagttgaaggtgatacttaaaaggtacttaggatgtaggagagttctagacatgttttttatagacatcacctaattttgaattccagtaccctgctgccaacacttacccttcctaccaacaaagctcacacctgatatatctccagaatgaagataattatcaattccaggctttgagaaaagtgtggaaataggtttttgttccagctaaatgccagttaaagaaagaaaatattcttgggcaatttcaatgggtcaagatgtgaatggctatcatagcccaggcaaaggagttgatactctcagttacattctgtcatgaagtttttgttggaaatcagagagcagtgaggtttggaaattgcttccttttgctcaacactaagaggaatttatagtggatgctttatatcatataaaacctgccaaaacttaactggaaagagtgactatattttctacattttgtaccagaaaaaatgctgaggtacagacagacatatacttttcccaggcagttttgtacagtgtgagagaaaacttgcagctcccaactgattacttttctctccaccctactgtctgtctggtggtgatgattgcagccacgaacaattgccactatgtgttgtgtaaggaggcaggatgatgtaatcatttttcctcctgttcgttcctctgtttagctacccctgtctgctattctgcattccgttctttcttgtgaatagcaaaggaatgaaaagcaatgttcaaattaaaccttgttgcttttaaagctgattttggagcaatcttcataataatctgagaggctattttcttattgttccgttttgttattatggagaatgtttggaaaaatacagatcttgctatagatagaaaatctcagcagtatttacaggattgaaatggcccttattaagaccattgaaaatggtattccatgtgctgtattttttttcacttttgatgaccatcctaggaaagaagttaagaggaatatgcattaagcaactggggagtagatataaaaagaggttatgggacatccatggtggactgttgttgccaggggggttcctgtaggcccagcatactccaaatagtggtaaaccaagtgtatcacctatatttaagttaaatttaccttataaattcacttctccctcaaactggccacattttaaatactcagtaatcttacatccttagggaagatgacacttccttaggcaaatacccagaatcccttctattgcacaaagtttttctgttttgtgctgttccttgcagatatagaaagtccacactatcaggctaagacatttttaagacaagaataatgatgtatgagctctccctaaagatttcttccatcctttttttcctccttccttccttttaattctccctccatttttcttagttcatcttttctttcttactgtctcttattgtagcaagtagtcaataattgcaaggagcatgggctttgtctgttcaggcaccgaatttgcaatggcctgctccttcctcaagatatctcagggtcatctgaatgttcctacaagtgaaagtatgcaaatgtggtccagtctgagagctgaatccccacactggctgtagggcacctcttttacttttcagtcttcagttttgaatagagaatataataggaagccaggatatagagaatttgttgaagatacatgagtatatgtagaaaaatctgtgtatgtgtgtatgtgtgtgtgtgtgtgtgtgtgagagagagagagagagagagagagagagagagagagagagagagagggagagagagagggagagggagagggagagggagagagagaaagggaggcagacagatagacagacagagagacttatagggagacaccgtaaccatgcctcctaagggctggctacaggtgtgcttaaccacgcctgtccgggcttggtcaggggatattcagtatgcatggggggttcttaaggtgcaggagacacatgggagctctcttctctctggcctccctagcttgcttcctctgggcacactctggctttcgcttggctggtattatttgaataaagatatcttaacctacaggctcatgtctcagagactagccttgcttggtcagatttggaacatcatcatatggagctctggagttagggggacttcatttaatctcagctatatcaattctatttgtaaagtttggtccatattgtttcaaaacagtcatctgtttgttagataaatgactgaatgtactcaatacttgttttgtaagaaaaatatattggtgtttaccacaccaatttattgtgaagattggatcagatcatacagagaaatcaccttgtacactgtaggcacttaatagataatttcctttatgaatgccaagggcaaaggatattaatttagcaaagaaataacaaaaatggagagaggaaagggaataaatccaaagggaatactgagaccagcaaccacagtgcacccaggtttttctagtgatgatgttcctccaacatagaaagccccaaagtacaaaatcctgcaggttgcttattttgttcctctagattctgggaacacattctaacaagttcagtgcagaaaatttggccattatctcttattcagtaaagtaattaacatggccatcctttcaagtgttgccatagtagttaccatggcaataaaatgaaaatgcaattcataacacataactcttctgggggtaatagaaagagaacttttggataactgaatcattttggtgatgtctcagtgcaacctgttacgcacttgagtgattcagacaaagggctctaatgaacaggagattagactgtttacatttgcaaccaaatgtaccaaatacattcctaatgtgttaattaacattttctccaaatgcaaaggaaaaacattccatctgaaaagacaggtaagaatctgattggaatgcagactcatttggcatttgagggaaaaaatcaatagaaagataaattaagcaaccagaagattcatttttaaaaagtctaaattataaagagagagttattgctggtaaataattcatacttcatatgctggtctttaaggttggaagagtgaaacacagaacatctctttgaaatgctttttatgagaatttggaaacagtttagaatgttaatgccaagagcttattattgcactatacaggagaaagcaaagcaaaccaaaccaaaataacaacaaaaaaacaaatcaaaccatagtccaagaaaagctaaatataaaaatatgtgggtcaagatacatttcttattcagtcctggtacctccaaggtacccaaagtggcctgtttttctttgtaaataccaacttggccctcagtctctttttctatagtcaacttgcacaatcctttgttagtatctgtgacaatcagacaccagatggtccctggctatcccttcctactgaggttcattcatttgctttttgaaatcccccttttgaatgtgatactgtcctttcacttccatctaacaagaacaacaacaacaaaagatgttatgtcacctttatagacaggaaaggctcaactgtgttgttgggagctgctcttcatgattcatgctcttctgaatcaagctgtcacactgtgagctgtcctctgtagaggtttacaggtcaaagaactaaaaatgacccaatgaacaacagtcaccaaaaaaaaaagccctttatgagagtggacatgtatcagagacattttctaatctgctctgtgacattttaatgtttcaagtttgaaatacccagtacaaaatatgactatcattaaaaaaacaaacaagcaacaaacccatggaaaggtatgatgaccatgtacattttcacaaataaatcctaaacaaccctgtacccaaattataatcaggctctctctcttcctttcctatactcatgtcttctctcaactgacaacaacgtgagctgccagtttctttgctagttgatcatgcaacaaacaagttctcatccaaattctactgtcatagaattggcctcagtggatgtcagtcagcaaggtcttccttggtattattgagtcttgtgaggatccagaagtagacgattgagctgattaatacccatagttctggttgattgaacctgcaaaataatgtgtggtgcatttttactaagttttgaaataattctttccagggtaatagatgtttactcattgatacagcattaataaagccatactatgcccaaatatactgaggacaaccactttcatttggaagactccagagtagcccaccatgcccacctattaagcttctcaataatatttgttatgcctcttttatcagttatattctagtcagcataggccttttgtccatctagctcatggctcttcactttgcagtgctagggaagacccactcacaagagtgagaaggggcccaaagtggattaaccatgtgactaaagactgcatctttcttctggggctgcagaactgagagtgttgttagactgtggcctcaatcttgtcttctgtgtcctgaaatcctcggtagaggcccagaatcaggacatgttttcacctgattttggatttctcagttataaatgtcaatacacttacaagtttttaaatatgagctgatatcagttagataccataacactttgcagtaagaaattctcgtctctgattcctcccatttacatgtgtcctacattgtcttaactgcctgtgaagaaaaattcaagccctaaacttggcaggaaaaatcttctcctagtcttgtcttcctttccttttttcaggctttcttctctgaaggggaatgtactgtgtatgtttatcttattgattgttaaataaaatactgtttggccaatgagacagcaagtagacgggacttggagtcaaagaggattctgggaaatgtagtagagaagtgctgatccaggcaggaagtgacatagcaaggagactcatatttaagcaaaggaaaacaggaaggtctctcttttccccaccattcctgctccagcagcacaatgtgatccaccggcaaggagggacgccaataagccatctgataaggtaagtcttataaaatatatagatttatgataattaagactgagataacagatgaggaatcctagtcattggccaagcagcattgtacctaaaataagtttctgtgtattcatttgggcctaacttgggcgggcgagtggcgtaaagctcacacgtggcggtggggctcaggtggcttttggcggaaagatttatcaacacttctccataacacagacccttggtcttctagctgcataagtgaatggtcatttgcaaaagagagtctttgctgtggtttgcctggatcacaccccttccccctccaatgcatattaatgctgtagaaaacatctctctctctctctctctctctctctctctctctctctctctgtgtgtgtgtgtgtgtgtgtgtgtgtgtgtatgtgtatgtgtacatatatacctgttgtaaatgtacaagtgaagggcagaggtggtcagatgtcctgctctgctgctctttgacatacctttttagaaatgtctccccttgagttcactgtttttgccgaagccaaaacaaaccccagccagcaaaacccagagatcctcccatctccctagaactctctagcacctcagtttcagtatgcatagctatttgaggtgctggggacctgaacttggatcctcatgtttttgcaacaagagatctctatggaggcatcacctcaggtttagaaaacattttttaaagttcataaagtagtaatttgggctaatttgaacaccttagtaattttttctcttgttgtctcctcttagtcacataggaaaaaagcaaaacgggagaaaaatcaagatttgattgttactacacagttcaaagcccagcacagagctcttaacttctacactcagcctaatgatactggaaatatgcagaagcaggtggggcaggatatatattctactaaaggaagaaaagatatctactgtcaattctgttaacttgtttaaaagcctactctgtgattatctaatctaaatgcttttcatctgaattactatttagaaactttcagacagcctgggtcatgaaaagaatttgaagggactaaacctgttgctgtacaagtttcttactagcttgagttagttattattcactctaaggacatgtgtctcctatcacatatgttcaactccatatagctatagcaagctgacatgaaaataatatagtgtagtgactgagatgcagagtgtgatcagcaaatgcctgagcccatccataaatggaaggaaatgctttacagtgaaatacacagaattaaagtccttggtttccattagcttatcccagtctgtatgcccatagtagataaaagaattgcagtgaaaacacaagagcacttctatgcactgtggtcttcccctgaaccaggcagtttacacagaacatgggattgtgccttttcccagtttaggattccatatgggcaggaatgtttgcatgtagaacagaagcaatgtcaacttgtaaacacctccatgtattcttacaaacacagataggagcatactgaccatgtttccccttccctcctcttcttccattccctccaaaggactaacagtattgaaaatttactatcccatctaaccaaaagaattgactaagatgaaatgaaagacaaaggagtggctgttacaacaaattccaaagaaaaacagaggttcactagagagtatcttgaaaacatattttgaaactgcaaaatttataaagaatgcatgaatgcctaggtatatgtggtctaccagaactgaatcaagaacacataaataatttatgtagatctataacaagcaacactattaaagtagtaataaaaagttctctaataaagaaaagatcaggaccagatggttcactgctaaattttaccaagccattaaagtaattataatgtcaatgtttcttgaattactacaaagtagaaaggtaaaggacattacagagtcaaactacatggtcactattacacagatatcaaaactagataaatacagagaaaaagaagttatagaccaggatccctaaagtcttaaccaaatatttataataaatcaaatttaagatcacgctaggaaatttatacagtgtgaccaagttaggttcatttcagagaagtaaagatgtcagtcaataagtggagtacagcatatacttatataagtaaagaaaaaaacttgattcacttaatccatgcagaaaaagcctttgacaaaattctacattccttcctaataaaatccccaaagaaattaggaatagaaaaagcatacataataaagattatatatgatatatttataatcaatgtgctaaatggacaaaaaactgatatttccaacaaaatcaggaacaatagtacacacatttttcaatatttctcaaggtagtagttaaagttttggctaaaacagcaagagaaaagaaagaaagatgagggattcaaacagtaaatgagatagtcaaaccaacttatttgtagagatggttctatctgtcaaactgacttatttgtagacatggtcctatacttagaaaccataaaacactctaccagaaaactcttgggtctgataaattgtttcatcaaagtatcaggataaaaaaatctacatatgaaagtcagtagcttttttatatcaataataaattgacaacaaagacatcacagagtaaaacactgtgtaaaatatagcccaggaatcagcctaaataagggtgaaatacctctgtaaaaggaaattaaacaaagcattagaaaattgaaagaccccctcatgctaactcattagttgaggaaagccaagccataaccaggatatattatgtgagcaaaaaatctatttcaatacaaggaaaaaattaaatgcgagtatttgcggataaaaataaaaaataatgtcccctggaacccatctcctagtcttctagatgattagagattctgtcacatcagccacactaatcatcacacatgctgataaaataattgtatgatgtattgctcagaacatattcctatcatttgtcaagatagctgtactttttagctatatgggggaatcagaaaaattgagggatgttgctgctgctaatgatgatattgatgatgatagaggaaactcacttggtattggcaatagataatgaagaagataaaataaaaaacttaaattatatgatgttatggtttatcatgttttttaaattctctccctctaattttacagagctcagaggatagacgaggaccccacattctctggttttctctggatagtgctaccaataccttggaagaaactttcaaattaggttccaagactacagtttctatttcttttccaacactacagtttctatttcttttctaacaggttctccaaggaagtccatattcctgctactttgtgtcagtgtttactttttgagaattttaattacatcatttctcccttcccttttcttcctctaaaccctcccatgcaactaaatgcagtggtagagcaccttgctccttgttagaatggctatctttgcaaacaattgttctactttcttcttatttcttcttaagctttcaggagacctagtgggatatgcaggttatatttgtaaatcttcagaggtaggactcaaaaatcatctatagaaactgctggagggaattgaaaagaaccagtttccttctcacaactcccctgtgtattaacaaattagatacacatgagtaaaagtattttatcacttctatttcagacttgaaactggataccttgtaatgcaaaagtcaaaagaggagcagctatggacctagtccctagacacttgttacatgacctattcaatagtcctttaactgctcagagcttgagtgaaggccaagaagtttcacattactcactacactctgtgagaaggaaacagtagagccagctcttgttcacattgctctggtggagcacatagacttccaaaaaagctactccctcagcttaggctcatagggtataaagaggtctaggatgagttcttaacaaaggatggtacctgatgtatagtaacgggattgctttggccaagtcagggattttatcggcagtatatttgatacacattttatcgaaatatagtgtacatagtattttgaaattatttatttttgagatgaggcttcaagaagactaacttgcccgaaacttgtgaggtagccaagatttggccttgaacttttagatatcctatcaccacatcacaagtactgaaagaggaatatatcaccatagccagtgattgagtatttagcataaattgtgttcaagtatgatttattacgaaaaatgatgattaaattatgcttgagtgagttttcttttttgcaaagagaatgcaattaagaaatctgaaacagaacatcacctggacaaagcctcctactgggagccgttcatttaccacaaatgtgtgatgatactttgatgttacatcatggatgacttttggaatttttaaaactttacagaactagacaaaacacactgttgtatctctggatttctttctttcttttgcctatcattacattggacactcatctaggtacttgcatgtaactattgattaaattttagttgtgtaatattgtatggtaattatgaaaattttctcttttatgataaacagagatactgagccaaaaagagtaaacttaacagagtgaattgcccaagtaattatggagcaagactgtgaagatatacttcaaatcaaatagtgatactttagtgtagagggaaaaatatcctctcagcagctacatatcaagttgtgtttgggactgtgttgaaaggctctgaaaaaaatcatgagagggattggaatgttagaaagaaaacaagagaaaataacaaaaagaaaatcctgtgatggctgtttgatttcatggcatttgtagaactttcaagaacacagatgagacaggtgattttacctaagaaggaaactagtcagttttgctgatataaaattactctggagataagaaatgagttgcattatatttattaagcattatgattattgttaaaccatgctatcttactgtcatgggttgaataagaaataccgtaccccattggcttgtgtgtttgaacacttgttcctgagttgttggtactatttggggaggttatgacacctttaggaggtggagccttgctggaggaagtatgccacagggggtgatctttgtatattcatctcacacttaaacttatacattttaaattaaaggaaacatctgttactgaaaaaaaagaggcagacttgatttaactgatggttactcattcttacagcaggcaatctcaagacatggtaaagatgtaagtggtgtcaccattgttgtatcttttcatctatagtgattcaaagctttgctggatacagtagtctgggctgacatccattttcccttagagtttatagaatatctatccatgatcttgtggctttcaaagtttccattgataaatcaggtgtaattcggataggtctgcctttgtatgttatttggcctttttcttttgctgctcttaatattttttccttattctgtaagtttggcgttttgattattatgtggcaaagggtacttctttttgtggtccaacctacttggtgttctgtaatcttttagtttataaagataatctgagagtcccttctgaggattgccctatcacttttggtttagaatcatacaaaaatggaaatattcagatatttcatttcctactgtaatgagtcctatgagtcagagattaaggtgcagactctttaatagacatacttttaactttttcctaatggtatggtcagaatatttgtgtctcttcaaaatgtatatggtgaaatcctaatctccaaggcaatggcattaggagacatgctctccagaagcagttaggtcattccagctgttccttcatgagattagttcccttataaaaatgactccaggaagccaacttccccacttttcaccatttgaaaacaacaaaaggaatttctgctatcaagaaagacagtgtcactggacagtgtctggcacccagatcttagattttccagagtctggaaatatgacaaataatgctgttgtatttaaattggtttgtttatgatattcattagggcaagagcaatgaagcaagatgcttgggacagaaatgtttactgtgatgtggtcttggtcttaaagctcagaatccattttccataaccttctgctttgactaacagatcaaagcaagacactagttctgttggaattagctcttgaccagggctccaaatttctaaaatgtttgcctatttctttctctttaatatacctagattctattagggtattaaaatctctgtgtcaaatatttgtagttgctagagattgaatttactaaacagcttaagatttggtttacctatataagttctgttatatttggtcagaattgaccagtttctgttactaaattttcacttcactacctccaaattaagcagttcagtctttccagaaaactaataaaatttgactcactttgatttctaatatacatggtgtttctatttttgtctagaaattactcaaattcacacttccttaaaagatacaaacatatttatgtgtagttgctgtagaatcaaatgagtggatttagaaggaaagccacatatgtgtataattcctatctgtgattaaagtgtgacctgaactgaaattggacactaaagccatattcataatcaaatattacccaggaggagggcttgggaggtcataatgttagaacttgacatggagtctcaggaagtacaatacagccaagtctttcctgaagcaatgggacgcccagcagaagtggttgactcttatttaaaggcaatgtttttagccaagagttggtggcacacacctttaatcccagcactcgggaggcagaggcaggtggatctctgtgaatttgagaccagcctggtctacaagagctagttctaggacagcctccaaagccacagagaagccctgtctcgaacacccccccaaaaggcaacattttagtgaaatatatatccttaaataaaagattaataaccatatagacagttgttcatgaataaaatgtacttgataaattggacttcacgagaacattctcatacaagttctggggttagctattattaagtatggtaggaggttcaacagcctgtaataattgcatggctcttttccctatttagtttgtagccagataaacatagcttaatttggttgattttgtctcttcactgaactactaatcctggcttagctgagtgctcatggtcacctgactcattcttgtaaaagcctaatcgctacattcagtcttccctcttctctcatttcgacactgatttttctttacacactgacttttctaaaatagaaacctgacctgaacaaagggcttgcaacaactctctcaagcctaataaactggtttcaaagtgtgtcctctgttataccaattaaggaatatacttcataaagaataatttcattttgaaataaagatctgaaaagtataagcgagattctcatagaactttgaaagtctaaataggtgcattaaaggctatcagaaaactagtgtctcttgcttacttaaccatattgttgggttttgttttatttattagctgtcattgcttaaaaggtaagtttttgttgcatgggaagactttccattttctagtgtattctcttataggtgaaatatcagcagccaagtctggtgttagaagctcttccacatgctctatgaagcttacattcactggtgaagttcactgtgacaagtgagacctctgacctctcctttagcctcagaaaagccattatcccccatagcacctcccttgaaattttataaagccattcttagaagacctagaatatttacaaaaccgggggtagaaacatcatccgaaggacacactgacagtcactttgggaaatgtggatcttgtagctggctttccaaccatacctacaaagtagatcagatacccaaagaagcccaagactcatgctttgaagttgtctcagattacttctgctactttgaacagttcttctttggcataaatatgtgaaggtgtgatagcagacagagactggcataatggtttaggtgacttccctcaccttagacacaggggtttcagagtgacatgttgttgacagtcactgctaaaatgtggaattgaattgtataatagagttttgttgatttgtattcatcttgttctgaccctgatgtttagcagctgagtgtggtgaggatgatgtggtcagtgtcttgtatccttgtgtctctatttctggcatcttcctcccttcacaggatccatgctgcgtatcagttcatccacccacccttaccgcactcaactgctaaacaccatggatggctgcccttcctttatccgagggattttacctttggatccaggtcctctcttgtctatacacatggtgaaattgtgttccttgagctacccttggcccagaaatagacagttcttacttctgtaagtaacactgttgcctagtcctaacatgtattctttgtctttgacagtgtatgtgaggtatggactagaattcatagcaacaaatcacattctaggaatactatagctatggcttaaactgtttaaaaggagacatacataaaagatgtgctgttttaacataatgttctaagttgataaatgtatcttatcaaataatcttccacattttttcctgcaaaatccacaaagaaagcccaataacaactcaaagagctcattagaagccaatatatgctggtagcatgatggttggtggagaatcgtgagtattgatgtgaccagagtaaaattgtgggattaagaattacataggaaagataacttgtggtgtatcaatacaaatagattttaaagagctttagaaaaccagttggtattctcttctctgtgggagactatttaactcactctcaggtcccttagcttcctgtagttctttgcagtaggtatacatgtacacatatttatttaaaaacaattaatgagaaaagagggtgtggaaggaataaaggaaagggggaatgatataattatatctcaaaatataaaggaaaataataaattaaaatgtaaaaatatgtagagagcaatgagagataaataagaaatggagctttgacaatagggaataaatgactatcccttcatatcagttcatgaatgtgggttattcatttgttttaattatcttgtatgtctatgtggttcacctgcatagtgctttcatgtgtacatgtatgtaagcacttaggtaagggggctgagtttgacatcaaatgtcttgcttattgctatactatccactttatttattttggtaggacctctatgattccagagtccaccatactgggtggttaagctggccagtctgcccagggttttccttatctgcctcccaaaggctagtgttgctacaacaactgctggtcttcttcgtggattctgggattcaaatgtgttttgtggattacatttacacagcaactgctttgtctactgagacatagctgtaccccatcgtcatgctatgtaaatcagtatgttttccgtgggcactgagaacgtatttatatgatgctccacatactctaagggttgctttgtttacaacaatattcattttatccttcctgtggacacattttaattcctaggcattgcttaatttgctctatgctttttccaaagtttcatctttcttatacacttttagccatgctttataacctatcttaggcgtcacctgaggcttcagacatacacaagcatgttctcattttcaatttgatccatatcagacttctaggatttcttctgccatcagagggctaaggtttctaaagggtatggcaggagttcagagatagtctacctcctttgaccttctatcatcccttatcaggaaaagtgtttggtaaatctatgcctctggtgaatcaaaatccactcttgatgttttttaaactacaggttagagcattttatttttttattttaattagaaagaaaattattttacatgtcaatcccaggtccctctctgtcccctcctcccctgcccctccccattaacaccctatctatcccataccctgtctgctccccagggtgggtgaggccttccataggggttcttcaaagtctgtcatattcattgcaataaggcctaggccacctcccttttgcctaggctcagggagtatccctccatgtgtagcactttctacatgtaaaaatggtggttgagagtttcaattttctcttcttaaatatctgtgacttgaagaaggtgaggaataatttgtctccctgtcatggatgaaggtttccagtgctttcttgtgactccaatgcatggcagagctatctccaactgttaaaattgcagcacccacacattgctatttagcatcctgtatagtggccttgcaatgggaatggaaattcaaggagaattattgcagcaacagattcatattggaaacaaattccagaatttagctaaactttcattcagggaagcttctagaactgctgaccaccattgggataagggacttttctaactgcccttattgggaatttcttggggaaaaaagtctgactttagtcctaaacctctccattgtcctagctagataagtattcttggtcgttgctatgcggagctcaaatatttttgccttgttctgagtgtactggtatgaaactcttccttacctctactccctacttagttttccttgtggagacaatttgagattctctctgatgtgctatgagctgcacacattcaatgtttgggatttaagcatttgtttcctcagtcttgttaatagttgtacagcatttacatggagttcgttgtcacagtcgttttcctctgaatgcttgccacagcattctaccttgtccactagtacttggtcatgttagttttgtataccccagtgactacagatccactccaccctcacgttaagaagggtcacagttctccatagagatactcatatctattcctgagtggctgggggaaacagttttgtgactagacctaggagctttcatttgccatgagtatttcttggtctctgaggattttaattccagcactgtattagggctatttatgagtcatgactcaaagttccctcctctgtcccttggcttggctcttcctgagaatatatgcagtgtctagtggataaagtttgtattatagattaaatatctgtttcactgaagttcaacagtagcagccaagtccttaggggatcctgcctctcttggcatgcagaacagtaacttaaaactgttcaaggggatttgacatgattctcctcctaccatccctaaaggacttaggtgtcttatggaaattgggccctattgtgtttaaattaaaaactacactattttcaacttacagtgttgcctaatgatgtgaaagcctgtttgccaggaacatcatgccctaagctatgcattctctcccactgactctgtgcattccaaaagccataataactcacatctaattaagccttccatataccccatatctagtggcctggcaaccatgtcaaaaatgaaaccttggcaaacatctgtgatgatttgctattctgaagaatgactgagaattgtgactaagtataaagtcaagaaataaatgaaagcacaaaacaaaacaaacaaacaaatgcatcatggaattttatatactacaatctacacaaaatattatgcttccaaaataaacacaatgtaataggaatttcagtactggtatagtatctcaatactataattttagagtccacagtattttcttccttttctcatttcccttgatactactcagctctttttacttcttattttaaaacaccccacatctcttctcactgtagtctgcctttctctcttctcccttccctctgtcttcattgctatggtcatcatgctatactagcagctgcccataagaccttactttatgctaagagtcacatcagtagttgcttagacaagttaagagaaataatttgaatgtgtcccctctaaaactctactgttgaaattaatggccaatgttgtgatattttgcttgccttctgtaaaatacagcttgcctagagattggagggtagagctagctattaattatccatacagttctggagaaaagacaggcaatgacaacacagggtagagatgggaagtgataagtcagattatacagtatcttggccctttcagtctgagaagtttgagaggtaagaagtgactatggctcctcctttgcttctctatttttcaacatttacctagatgtcagactccaggtttttattgacaagactgattaggatcacactacaggccaatctgatagaattaattatgatcaagccatgatgactcctctgtcagcaatgggaacaagcatcttagaaagagagtttatgcatagctcagacagtttgatcttccattttcctgctgcatgagaacacagcattcattctttttgtccttcggacttccatcctgtgaagatgctgtaaacagacccttaccagatgttcccattgtgattttggatgttccagcctctagaactaagagagaatatctttctctttaacaattatcccataacacaattttctgctatatcaacaaatggactaagacaagtcccaagcattttctctccatgaacataaatattaagagccttctgagaaattttaccttttttctactttacatgaaagtttttaaaattaaaattctgtaacaaaacacattttagcttcatacattaggagaaaacataactattaactcaaactcatccggaatataggaccttgatattgggttcaaggatttctccagacttcattctgatgactgatttcacattaccttgagggtaaaagcagttgctacacaatccaaaggaaccgctgagaatacatgaaagtgaatttttaaatgccgaataaaaacaactgggtgaatgggtggtagtcaggatggaatttgataagacagtcaggatcatagtcaatatgttttgcatttaaatctcaaaaatctcctagacctgggaaggtagcaatatctgaaagggctcttcacagactcttcagtcttcagtgagcaccataaaagcaagagtacaacaaaacaggaaaataaaatagagcactgtggattcgcagtgaggggaagagactatttagggaaccctaccaagaggagactggtcatgagaatctgtttcccaggcattgacagagtattcgactgaaagagatgaatagagactcctgggacaagttgtgcagttctgctaaactgactaggaacgaaggaactgaaagtcatttttgagaactgattaaaggtataccttgacattcagatgttagacaagttaaaatttggtcttaaaattgtaaatataagattctggattggcaaagtgaatgtttcattttagagtatggataactttggtaaaaaaaaaaaaaaagtagtcagggaaatgttgcattttaccaggaaaagaaatgaaaaggatatatgtaaatctttctctcattcactcactcactcaatcactcactcagtcactcagtcactcactcactcactcattcattcatttatttaccaaaaatctactgtcttgccggcaatgtgctattgtttgtatttgtctcactgaatcagaatccaacttatagtataacagaagaggcagccagttgagaatgaagtatttcatcaatttaattgtaatagttgtgtctcagggaaacgcagactacgctgaaaatagtatgagacttgagatatcacagaacatttcctggcatctaaagtgagattttaaatgatgaataagaactgatcaagtgaacatgaaaacaatgaaattaccattctgagaggtaagtgtgcatgcaggaactctgattccacaaatagattgacatcagaagaaaactgcaagttgccaatgaatgcagtcaaagaataagtgggcaggaaaatgtgctagaataaagttaaagacagcaggaagaattactggaagtgtgatgtgataaagacttacaaaaggctgtcctaaatgcaatagataaacatttttgtgctattgaagaccaaggcatgatgttataaagcctttcccaagactcttatgctaattacagagactaagtcctgctgagttctatgcagtgctacacaggacagagatagcaatccataccaaaatatctgaccagagggacataaagagacatttgaaatgtaagacaataatacaggcaacctgcactgtccacataaacagattaaaaaaaaaaccctcattttgttctggaaaagacaattatggaagaaacaaacaagacaacatgagaaaggagcagagggaagcatagatgaccaggggtttctctgtagacacaatagttctgccttctatacactttctagaaagaaagcaggtgaagacatgacctccagtttctatgaagtataaagaaagattaaaaggtcaataaaagtagatgtgtgaggccactttacaaaaactccaaaaacaataatgtataactttctggttacttactctagtcaaggactaaaactcatttcatctgtcaaccctctaattaaatacattattgctccattattgttaaaagggaaactgagccagtgtgagatgaaataacttgtccaggtctcaaagctcttgaatggatgagctgaatctcaagcttgttgtgatcctaaaacttgataaacattactatactcttattcttcattattttaccagggaaggaagaaatagtatagaacagatgaaaaataggtgaagagtttcaagtcaggagtcacaggaaggagtgaccaacaaacttggcaggtgccatttctcgggaagggtcatagattatttctagctgtaagctcatcacactcaaactgatccttttttatgctagaatttttgatacaaagttcacacattatgggagccaattagtttcagttttctttttatagattaaagcagtgcaaaaatgtaccatatgtagttatgcaaagaagaaataaagctcaataacttcagtgagtacaggaaggaaggcatagccttcttagagtgatgaaactgcacgttgttcaatttccacgtaggtttactgcaatttgtgttgttgttgaattctaactttaaagcatgatggtctgataagccaaagtggattgttccaatttttttgtacctgttgaggtttgctatgttgccaattatgtggttaattttagagaaggttcagtatggtgctgaaaggaaggcatattttttgtgtttggatggaatgttctattgatgtctgttattcccaattagtcataacttttgttagttcctttgtctctttgttaagtttctgtctggtggtcttgtccacccacagaatgggaaaagatcttcaccaaccacacatccaaaagagggctaatctccaaaatttacaaagcactcaagaagctagtttccaaaacaccaaataatccaattaaaaagtggggtacaaaactaaatagacaattcttaatagaggaatctaaaatggctgaaagacacataagaaagtgctcaaaatccttagccatcagggaaatgcaaatcaaaacaactctgacatactatcttactcctgtcagaacggctgaaatcaaaaacgccaatgacagtttatgctggagaggattggaagaaaggggaacactcttccactgctggtgggagtgcctacttgtacagacactttggaaatcagtatggcgactcctcaggaaaatgggaatcagtctatcacaagatccagaaatcccactcttaggcatgtacccaaaagaagcacattcatacaacaaggccatctgttcaatgatgttcatagcagcactatttgtaatagccagaacatggaagcaacctagatgcccctcaactgaagaatggacagagaaaatgtgatacatttatatgatggagtactactcagcagaaaaaaaaaacaatggaatcttgaaatttgcaggaaaatggatggaactagaagaaaccattccatgtgaggtaacgcagtcacaaaaagacaaacatgatatgtactcactcatatgtggattttagacatagagtaaaggattaccagcctacaatccaccactccagagaagataggaaacaaggaggactataagagagacatacatggtcccccagagaagggaaaagggacaagatttcctgagcaaattgggagcatggggggaagaagagagggagctaagagaatgtgaaggggagaaatgtaggggtaaggaggacatgagggagctggaaggttgagcgtggggaaaacagaggagagcaagataagagataccataatactgggagaagtctacatgtccaactctcattgaaaaaataccaaaaatatgaaaagccaagctagaaccttctcttcaaacctaccagccctgtaaaatgtttgcccatgagatgaaacaatctaggacacagaatttaaaaattaatcacaaacttcatcaaaaaaattcatggagtttaaagaaaacacaaataattatctcacaaatggactttgggagcctgttccctatgaaggatactctttcaacctagatacatgggggatggcctaggctatgctccaaatgatatgacagactttgatgataccccatgggaggcctcaccctccctggggactggatggggggtgggataggatgttgatgggaggcatggggggatcagaaggagagagaactgagataggtatgtaaaataagatcattttaatttaaattttaaaaatgaaaaaaagaattatctcatgaaatcaaggagaaattaagaataaatccttggggatgcttttgaaaacatagacataacattgatgaaatgatgaagaccaggcagaacttgaggatggaattcaataaggagatagaaacatcgaaaaggactcaagatgaaatgaagacagaattgaaaaacccaataactaagctagaaaactcaaaggaaaacattaaaacacaaatgaatcaagcagaagacagagtaacagaataaaatatctgggagtaatatacagaaaatatgtgacactatgaaaagaataacactaaaactttgaactatctgtatagataaaggagaataatcccaattaaatggaatataccagattttcaacaagatcatgaaagaaaacttgcccacactaaggaaagacatacccttacagacacagaagcatacagaacactgataaacaagaccagaaaaccaaatcctaagagcatatcatagttaaaagactaaatagacagaaatattgtggggtattggcacattctgtgaagatatattgttgtgattggattaaaagagagctgaatggccaataactagatatgaagtgtaggcaagacttctgggtagagagggagaaagtaggaaatgaatcaaggtgctgaaaggagctaggagacaaggaaagttaacaggaggtgcaagatagaagagaggcaatgacacaaaattgaacatagattaatataaatgggttaacattctctttggaggaataccttgctcatcctagacatagtgaggagggccttggtcctgcctcaaagtgatgtgccacacattgttgacttcccatgggaaaccttatcctccccttaggtgtggatggtggtggggtatggggaaggtaggcagagcaggaggaggggaggcagtaggaactgggattggtatgtaaaatgagaaaacattgttttaaaatgacaaaatcatatatatatatatatggattaatttaagttataagatctttcataattaataataagtctctgtgtcattatttgtgaactgactatccaaagaaaaaaccgtctacacagaacagagaaattatactgaaatctccaagagaaaagaatgcaagacacatgtaaaagacatccatcagaataaaactgattttcaataaaaacaatggaagccagaagagtcagtaatagttcattccaagtcctaaagactatgatggccatcatagagttagacatccagtaaaacaactgtaatagtcaaatgagaaagaaaacctttgtaataaaaacaagctcaaaaattcatatctaaaaaaccaaacctaaagaaagtactagaagcattactttgggctgaagagatgaataatcagagcatagaaactgtgagaagaaatgttagtccataattattaagacaaaaaataccaatcagaatataaacaatacaagaatagcaacataaggatctccacacacataccaaaagtaattttaaatatcaatggcctcaatttttcaatcaaaagacacaggatgactgaatggatcaagaaacaaaatccacctatgtgctgtctataagaaacaaatcttagctgcaaaggcgggcatcaacttggacaaaggtactccaatcaaatgaggccaggaaacaagctactatccttatcctaatatctgacaaaacagacttcaaactaaaaatcagaagagagagaaacacctcattgtaaccaaatgaaaagttaaccaagatgacattactatcataaacaaaaatccatatcataaaaaatgtagtactggatttaaagacttagaatattatcaaccaattaatagtaggtgattctaataccccccactttcaccagtagtctggtcatctgaactaaaatgtatatacaggagcatcaaaattaattgacatcacacattaattagaattagcagatatctacagaatattccacccaaataccaaagaatatgaattctactcaccagcacatgaaacctttttaaaaatagatcacatctggtgacacaaaacacatctttacaagttcaaaaagaggtgaaaataactccttgtaatctatgtgactaccacacaataaacttaaactttacatcaaacaaatctctaataaagacacagactcatgcagactaaacaagtcaacactgaatgatgaataggtgtaggtagaaattaagaaagaaataaaaatttcctagaattaatgaaaatgaaaacacaatacaaaacaaacaaaaaatcctttggaacacatttacgcagccccacaaacagctctaaatgcctacaataaaaaattagagcacaaataaatgacagtataaaactcaaaaagtcagagaaacaagcccagtcaatggtaagaaataacaaaattcagaccaaaactcagtgacaaaacaacacaaagaattaaggaatctaagagctagttctttgagaagataaacaaaactgacgtggttagcccaaatcaccaaaagaaaaaagatgacccaaaccaacacaaacagaaatgaacagtgaaatattacaacagatatcaaagaaattcagaatattataagggaatacttaaaacttgtacactgttgagatagaaaactatagggaaatggatgaatttctagattcagataaaccactaaagttaaaccaagaaaccaactacctaaacagggccataaaaatgaggagactgaaatagcaataaaaaaccttccaatttaaaaaaacaaacaagcagcaacaaaaaaccacatggctagatgggtttctaccaggggaagtctaccagactttcaaaagagaactacagataatccttcttaaatgagtcaactaaaaaagagaaagagagataaagagcttctaaactccttctatgaaaccactgttactctaatacccaaacctggcaaagcactacaaaaagagaaaactacatgctgacatccttgatgaattcatactaagaaatgttcaataatatacaggcatacatcacaaagattatacaccatggccaagttgaccttttgcctgaaatgcagtgatggttcaatatatgtaagcaataagtttattaaatcacataaatggacttaaagcccaagaaaagaccatgaggcttcatccatatataaaaacataaaagttaataaggaagtttcagattggggagattcttccctagagaagagcaataccaaatggtcagccctgaaagcacacatacaagtaacattataagactgagatggttgaatttataaattatatatatatatgtatatatatatatcagctatacattttataattatatataaattaatatatattatttatatgcatgtaatattaatgggaaaaagaagccatgaatttgaagaagagaaagcaggtgtatataagaggtatgggaagggataaaaagaaaaaagaaaggatagaattacattataatcttaaaagttaaagaaaaggtatttattttaaaaaagaactcagtagcattaagtatagtcgggtatgttgtatattggatctctagcatatatttttcttatagccaaaatttgtacccttttacctacatctccccattttcccaatataacaagtggaagacctaaaaccataaaggtactgttcaagcacagtaaatatggtatcttatgaaattatcaatgaattaataaaacagttttttcccttttggatgctatgcattcattttttaactttagaagcactcttatttacatatcaatccctccattccctcaccctcggatcctccaatgctccccaccaactcccccaacaaaccccacacccagtccccaaggatagtgaggccctccactggggaccatcaaagtccctcacatcatttgggggagatcctaggtcctcttttttgtatctgggctgcaatagttcccctccttagggaatgggttcccaaagtccatttgtgctctagggataagcactggctccactgttagaggttccatagactgccctgacctcctagctggcacctacattcagagggcttggttcaattcaatgctggttccccagatttacgactaggatatccacactctcactaggtcaagtcaactgtttctgcaggtttgtccagcaccttcttggctcctttgctcatgcctgcaccctctctacaactggattccaggagtatggctcagtgtttagctgtgggtggctgtttctgctttgatcagctactggatgaaagctctaggagtgacaaccaagtcatcaatatcattagaggggaagggcatcaaaggcagcctctctactactgcctagatgcttagttggggtcatccctgtggatcccccaactttcaccctgtgccagtcctctctccaaacctatagtggctccctttataaaggcaactcctttcttgccctcctctaatcctcccctggtttcagtgcagaattctaccagaaattcaaagaagagctaataccagtactcctcaaattgttcaacacaatagaagcagaagggacattgccaaactctttttaagagactacaattaccttagtacccaagccacacaaagacacaactaagaaagataactattgactaatatccctcataaacattgatgaaaaaatactcaacaaaatcctggcaaattgaatccaagaacatatcagagaaatcatccaccatgatcaagaaggcttcatcccagggatgcagggatggttcaacatatgaaaatccatcaatgtaatccaccatataaacaaactgcaaaagaaaaatcacatgattatctcactaggagatgaaaaagcctttgacaaaatccaacacaccttcatgataaaggtcttggagagatcatgaataacaggcacatacctaaacataataaaagcaatatatagcaaaccaacagctaacatcaaactaaatggggataaactcaatgcaattcctctaaaatcaggaagaagacaaggctgtcaactctcttcatatcccttcaatattgtacttggtgttctagctagagcaataagacaacaaaaggagatcaaggggatacaattggaaaggatgaagtcaaacgctcactgtttgaaaatgatatgatagtttacataagtgaccaaaaaaactctctcagagaactcctgcagctaataaacaccttcagcaaagtggcagcatacaagattaactcaataaaatcagtagccctactatatacagatgaaaaatgggctatgaaagataacccatattcttggataggtaggatcaacatagttaaaagggcaatcttgccaaaaagcaatctacagattcaatgaaatccccatcaaagtcccaaaacaattcttcacagactttgaaagaacaattgtcaaaattatatggaaaaacaaaaaacccaggatagccaaagcaacgatgtataataaagcaacttctggaggcatcaccatccctgacttgaagctttattgcagagccataatcctcaaaatagcttgctattggtaccaaagtagacaggttgaccaatggaatcaaattgaaaatcctgatattaacccgcacacccatgaacacctgattttttgacaaagaagctaaagttatacaatggaaaaaagaaagcatcttcaacaaatggtgctggcataactggatgcagacatgtagaaaactgcagattgtaacgataactctttatgccaactgcctgagttctgccaccacatttgggctccaaaataacacactgagtcttatattatttacaatgctgctggccattgactaggatttcttataagctagctcagtcttaattatcacacataactactaatctatatattttataaagacttatctgatagaggatggtggcagcatgcatcctctcttgtgaggctctcatggtgactcctgtttttactacatttcccagaatcctcctcaactcctagccccacctatcttgcttctctattggccaacagtctttatgtttcagccaataagacaaacatatacttcccctgtcctctcctcttttctttctaagtcctctcctcttttctttctaaataaaaagaagggttttaccattaacatagtaaaatatataacaaaacagttattaagtaagaattaaagttacaatatttagtccattaacatttaggaatatttaaagaaaatattctatcatccattctatttttgtgagtctagagtcttatatgtaacttatcatttataataactaaagaaaattgtaaccataactatctgtcttcaactccatcaaagaccatagaaggataatatataaactctagaactgacagagagatctccctacctggacagtcacacaaagttcctctgtaatgttggggcatccatcttcatcctataggtcacagtgtgtctggcaaacatctccatgaagcaagaacccttcaggactgttttttttgcaagttcagcagtcactttccttgggtcttgcatgtccagtttatcaaacagtccaggccagtgcagtttcttgcccaagtgtctagtcttgccatgttggggcaaactccataacgagtttcttcgatgcccaacttcccctcagatgtaattggtatgccaggagcagttgtgtctcactgcaatacaaaaccctaaaccatttaaattccttttatcctgtaggtctttgaaaggtttgaagaaaatctatccatctcaaatacatctctgtgaatctagaaaacctaactaacctaactgtaacttttgactattatacctaattatatacaatctatatttaattatgcattacattttaaatgatctgtataaacacaatacctaaacaagaggagaaatatacatatcacaaaattgaccttaaggttgtatcaataaatgaaaatccataccaatgcaaagtattcatttctatacccattccccttttgtcctgttaaaagattttgattgtgatcattaccatttatatccaactccatttaaatgaaaacaaatacttataaacagtatttgggaattgggtgctgatcatttgaaactgcttcctgctggatgggggtgatgtccataccatggggatcatgataaaacacagaaacctggctgtattcatctatgactgcatcatctcagctgttttggatgtaggatcacttgggccacttcttcaatgggtcttacttgatcaaaccatattagtctggaaggaatccacagcttttcattttctgtgtaaacaaaagcagaaattattttcccaagtagcctctccttagacttaaattttgaagtaaagcatttttaaaatatataagttggggtaattctgcagcatttaaaatcaaatgtctgttagcagttgttgttccttcctcatcaattaaacaattcaaagacaatacaatagtattcagactctctgtgtattttccatctttatgtggctttttcattactctatttcttttacttttatgtttttcttttatgagacagtgtttttctgtgtaactctggctgtctttgaactcactctgtacaccaggctggccttgaagtcacagagatctgcttgtctctgcctcctgagtgttgggattaaaggtgtgtgccagcactgcccagctactctttctttaattactttattctgtttctttgctctcgcaaacctatgtatatttttaaacagccctgcaggtttttctgcttatgctgagtcaggaaacctcccttaagggagcagctcgagtctctgcttgtctccagcaaaacagagatcacttgagaaaatgctgctaccaagaagttgtacttatctccattgttttgtttctaaaattcatttttaagttttttgtgaactttttatgtagaagtttgtaaaaccatgtgggatgccattttgtaacgagaactctttatgccaatcacctgagttctgccaccatgttaggaccccaaaataacacagagtcttatattatttacaatgctgctggctaatgactaggatttcttatatgctagctcagtcttaattatcaaccataactactaatttatattttttaaagacttttctttattgaggatgctcgcagcatgcgtcctctcatgttgggctcacatggcaactccttctttactacatttcccagaatcctccttgactcatagccccacctagcttgcttccctattggccaacagtctttatgtttcagccaataagacaaacatatacacagaaggacttccccatcaacagataaatccatatctatcaccatgcacaaaataaaacagtttttaaatgttaagataaacaggtaatagttgtatagagatttagcataaaatcagactctatgtttcaccttaatacatagctttgtggattgtattttttaaataagagttgaaagcttatgtgaccatgttgatcctaagttaataaatatgcatgtaaactaatattgtcttagtatcttatttgagatttaataacctgctatgaatattttctacataaatgcgtcaattaaagccttatctcaaggagagaaaaaaatacagaataatgcagacattggtttttcttctctctctctctctttctttctttctttctttttctttttcccccttttctacttaagatgacaacaaaagcacaaaaaaccaatgaacaaatctggttaaatcaaaccataaacctgtacaacaaagaaaagtgttaataacatacaggcacaatctttgaaagcatatatctgaaagtggtgatatctaaaatatataaggagttcatgcatctgttcctttccttaaaatactattattttatgggatcaggagtcacttttctgagcttatctaactttaagtactgcaagaagaccctatcttcaatgtttgagttagggattggaatatggatcttggcacacacattctctgtagcagttagaaacactttgagacatttggccaacacacacacacacacacacacacacacacacacacacacacacactcaaaacccaaattaattttaaaatcttaaatggaaacttctcagtaagcatgtttctacaggacaattttagcctattttgagatttatgtctgttgtcttttatataactaagggaatacattgttaatgtctatgaaatatctttactttctaaaacaggctaaaatcacctttcaaagaccacctttctatatcagaaagttttatagtgttcttcagctgagtggagaaaagtgctatttaatctgttcccattgcttcactgttcttttcactccaagacataagcaatgctccttgctaatcactctattaatggtgtactatctaggaactacagtccccactgtgagccattacaagtagtgagaaaaggtcactgtgactttgagtgctgtatctgtgactcaggaatgattcattatcagatcatcctgtcatgaaaagcttagtggtgtctggtcttacagggtgagagacttcacagatatccagagctatgaaaattacttcacttatatcacatagctcctgtctcaaatatagttaatgtttattgatcaccatttaaaataaaaagcaatattttaaatatatttgagaatttcataccttgtatttttatcatgttaatcctattgctccccctaactccttcctatctatggccacatgctacccaactaccctctttgtgttctcttttttgtttttcaatagccgaccaaggatgggtggaaccataaaaacaaaccaagtgaagtaacccagggccagggtgacaaatatcacttattctcactcacatgtgggttttagtgtccaatatttaggtttgtgtgcttaatttggaatacctgcataattcaggaaactagaaaggggtcattggaggggaggggaaagaaatatcttgatcatttattttaactaggactcatctcagccaataagcattaactaagaataaaaatacacactaagaataaaatacacaaaggacatcagtgattcccacagaatgaggaatgatcaaggccctggacagttcagctaaggagtcacctcttcctcatctccacattagcccaggtgggcacccacactctcccctccacagatgctcgaatgcctacctactttgacagcatccaggctcagctgaccaagacatttaatttttctccagtgagcaaagtagcctcatacctccagggatcttggatctatctgatttcattcttatagcactcacggggaacttgcctaagcaatcaccatccctaattcaattcctaaaacaattctactgtatattctgtcagggaattgtgagcagaatctccatcttcacagtactgtctggttgttcccttcaccaacttgctctagcaaaacagaaactgggtcacactaaactcacagcttcatctgcagatgctctaagggaggatgctttctctttgaagccttgttgccaaagggcccagatgcaaactgaggaacatgttgctgtttgttgctgttacagcttagggtcttggctgtgttcattttctctaccatttaaagaattataaggagggggaaatctcagacacagcaggcagcaacaggtacaaattttattataagcaaaggaacgcacatccatgtgcaagaaagagagagacggagacaaagacacacacacacacacacacacacacacacagagagagagagagagagagagagagagagagagagagagagagagagagagagagactcctcacaaagtggtaagggaatcagaagctgaaatctgtcaccactccccacggtggaagactgaggtttttaatgtgctttttgtggcttaaggtggatttccctcacctaattttggatttgtcgatataaacaaaggaggggagacaacagcttcaggattggccttgaacatctaggacaagcctgaacccaccatcaaaagggaaaccctacaagggctttatttcaggtcatgagtctgaggaagatgcttactacctttattctccagagggccttgccgtatctgtctgtctgtcagggttctttcttgctcccatttcctcattgccacttcaaagtatttctctttcctaatgtccctttacacacacacacacacacacacacacacacacacacacacacacacccttacattaagacccttgagttagaatgccacaaataagaaagaacatgcagttccatagtgtctacgtactacattttcattaaccattcatcagttaaaggacatttaggttgtgtttgttccctagatattgtgaatacatacagtagcagtgagtatctgtggagtagggttcatacggagtaggcatataccaaggagttgcatacctgggccagatggtagatatgtgttacctttttttgagattaatctgcttactttctagaaatgaaactcgctctaaacctggagcttgttgatttggctaccctatctggctatcaatccccagggattcttctgactctgcctccccaatgctgggattacagatgtgcacagccatactgtctatatttccatgtattctggaggatcaaactcatgtcctcgtgcttgcaaagcctgcactttgctgactaagctatctctccagcactaaatccaggtgtctttatatttttttctctactcacatagtaggacaaagttgtggagaagtggatgggtatgttgacttttagtttttatttctttatcactgaactaagagtccctatagtgcataggagcaaggtgtatccagtggcattaacaattcatttattcccccttttctgtctattccagacaaactcatatcatcacctctgttattcttggctggtaatactgcattctatattttttgaaaaaaagttatatataggagtaaatttgtcatttaaaacatttttaaatttgaatatattttatcatagtcttcccctcttccaaatccttccagactcttaagcaactttaagctctttctcaccaatggacaggatacataattagctacttacccttttccaattactcagagagtggatagacatgagtaagatttggattttggtttcagttaccctggcaattctgatacagcctttgaaataactaatccactaaaatacacacccagactactatatggtaaatttattaatgacttactctgttcactaagcaaaaaccagtggttgactatgtgatgggccccagcagaagactccaatattacgaaaatgctaaatggatgtagtaataaagcgacccctaatttcttcatatgcataaatgagggtctctccaccatcatcagagaagttaagatttacaggagatgttaatgaaagcagagacccacagctggtctgcattcagataatgagagacttcggaatgctcatcttttaaggggatagtagtaacacacctacgtcactgtaattgcttcttaaaaagtattgcattattattaaaagctaagaaatttgttaacatttcatttccatcatgtcttcttcaacagatgttatggatctcagtgtttttctaaagagcagtttgtagttgtttgactcatagtcttttgtgacatgtgacaaaatatgtcttttgggatttgtgtgagactgaggattttaaaaattgtgtcaataattctcattctgaatgatgataactaaatcatcacaacttctagtaaaaagttctttttattaactatgattagtgtgaaggacttttgtctattaatatttggtaaagatgcagcgctcctctctgtgaacctaaaaaatatcttactttggtcatgaaaaccttttttcaaaaataatttatattggattgtttggtgttttagtggctagcttcttgagttcattgtatgttatggaaatcaaccctctgtcagatgtgggcttggtggaatatctgcttaaattctgtgggctgtcattttgtcttgctgactgtgtcctttgccttagagaagcttctcagtttcaggaggttccatttattaattgccgatctcaatgtttgtgctactggtgttatgctcaggaaacagactcctgtaccaattcattgaagggtacctcttactttcacttctaagaggttcagtgtggctgggtttatgttgaggtctttgatccatttggacttaagttttgtgcatggcgatagatatggatctaattgcaatcttctacatgtccgaatccagttatgccagcaccatttgttgaagatgctttctttttccattgtgtaactttagcttctatgtaaaaaatcagatgttcataagtgtgtgggttaatatcagggttttcaattcaattccattggtctacctgtctacttttgtgccaataccaagctgttttcaggattatgactctataatagagctcgaagtcagggatggtgattcctccagaagttgctttgttgtacagggttgttttggctatcctgggtcttttgtttttccatataaagttgagcattgttctttcaaggtctgtgaagaattgtgttgggattttgatggggattgcattgaatctgtagattgctttttggcaagattgccatttttactatgttgatcctacccatccaagagcatgggagatcttcccattttctggtatcttctttaatttctttcttataagactcaaagttctcactattcaggtctttcacttgtttggttaacattacccaagatattttatgttgtttgtgtatattgtaaagtgtgatgttcctctgatttcattatctctgtgtttatcatctgtatatagtaggactactgatttattgagttgattttgtatcctgccactttgctaaaggtgtttataagctgtagcaaagtggggtgcagaactaaataaagaattcacaatagaggaatctaaaatggctaaaagccattaagaaagtgctcaacttccttagctatcagggaaatgcaactcaaaacaactctgacacaccatcatacactggccagaatgactaaaatcaaaaacaccaatgacaacttatgctggagaggatgtggaaaaggggaacactcctccactgctggtgggagtgccaaatcatacagctgatttggaaatcagtatggcagttttttcaggaaaatatgagtcagtctacctcaagatccagcacttcctctcttgggcatatacccaaagaatgtgcattcatacaataaggacatatgttcaactatgttcataacagtgttgtttgtaatagctagaacctggaagcaacctagatgcccctcaactgaagaatggatagagaaaatgtggtacatttacacaatggagtactcggcagagaaaaaacaatggaatcttgaaatttgcaggcaaatggatggaactagaagaaaccatgctgagcaaggtaacccagtcacagaaagacaaacatgagccttcactcattagctgactgaagcagaaacagccacccacagctaaacactgagccaaactcctggaatccagttgtggagagggaggagggatgagcaaaggtgccaagactgtgctggagaaacccaaagaaacatggacactctagtcttttttttgcatttttttaatttgaattacaaacaagattgaattacatgacaatccctgttcccttctccctcccttcatcccctaccaaccccccaactaaaaccctacctatcacatatgcatatcctttattctattcttctattcccctgactcaacctttctgttccctcatgacctctgcatccttcctcttcttcccttctcattctctcagctccctcccagacactctagtcttaaagctggggaaccagcattggacctaaccaagccctttgaatgtgctgccagctaggaggccaaggcattctatgggacctctaacagtggagacaatgtttatccctagagcataaatggactttgggaacccatttcttatggagggatagcattgcaacccagatacgggaaggagggcctgagccctcctgcaaatgatccccagtggagggcctcactatccctggggagtgggtgggggtggtttggagggtcggtgaggagcatgagaggatgggagagcaagggaatggggggatggatatgtaagtaagagtgctcctaaaataaataaaaatgtaagaaaaaacaatttatagtccaaaatcaacaaagcttatcatgaaccctaagggaaaattgaatcatggaaactgagagtcaacagtctgattcttttatgaagacttattttaaaaggaatcaaaatgaagaatttaattgagctcttaaactgacttaacttttttcttgaaagcagactggttttcctcatcagggagaggtagtctctgtcaggtagaacagttggggttggggatctggaggacttctcatctctgcagctataaccagtgactcaaaacttagaaagaatgacttttactaatctgaaaagctgtgagtaggccatagctaattagtgaagggaggaaggactatctgttgatcacaaatggaaacactagatgttggttaattccaagtctaaaaaaatgaatacaggtatcaatggttgaaataaaatcttcattcttactgttttgaataaaccagcatcataatatgcagttagttattttctttcatcttacttttgcccaaatgttttcttcacccagaaatcttgctatgtatacctagaatccatgtttgctaaaaagcattgactcctcacttgggtctgcaagataactaaaagcagttggaaagcctgtcatctttcctccatttcctatctatccccttttctctgggtcagtcaactgcttaactttgtgtgaaggtatatcattgagtgagcatctgttcaaattgcattgatatctaatctgccccgtcctgcttcaatggtgatggcccagggagaagaatacctaaggcatctcctggagagctcttacaatgtcctgccccagacacatgaaaggtgccaaaaggtcaccactctgtctctttccacaggcatcttttcttggattccacatttaattgttcaactagacgtctcatattcactgctgcctaatgattattaaataacaaaaatacttagcatattcaagtactagaatatctgatgattattatccaggacagaaaagtataaatctacttaggaatattttataaaacatgaaataatgtttttcttctgtttatagtttttgttgaattctgtgtgggtatcatggaacattgagaagatacatgaagacatcactgacaccttgtacccaatggttaacaatgtttgatatatgtcatctcagtcttgcaccttttctactttattaatctacttcatttctataggttgagtatcatctattttaaatgctaggtacctaaagtttttataatttgaggttttttttcaaaattttcaaatatttttagtatacttgtgctgaaacatgtcacagaagttaaagtgtggaattttccatcttgatattatctcaggattcagaaaggttctcattttggaactgtctgcgttttcagattagatataatcaacttgtaaaatagggctgatagttaaaaaacttaactgcctttccctatttctaccacagaaaaaaagataatgtttccctataagtacttctttgagaagcccaaaagtcatttactttgggaatttagtaagtgcccgtgaagagagctacaggtaagctggattttccttctagactggggcaatgaagagtgagacttccatattttaaatttatctttccaatttattttaatttcctttatgtattacttattcattttatttttctcctattttactttacaggtcatctgtgaagaaattatggattccagttttatgtttttatgggattactatgtgaatgagtgggtctctgaatctatatctatttcttctgcattttcttgggctcttttccttctgttcatttgttttatcttattctgatgtgtgattttttttcttatagcattaaaatattacatcaatttattatatcattttcccttataagcctgtttgttttctaatgagagacaaaaagagggtggatcaggacaggagaggaggtggggaggagctgggaggagtagcaggaggtgaagatgtaatcaggttgtattatatgtgaaaaaacattttctacaaaaagaaataaaattaaacagctataggtcaccaaacatgtagaccaccaagtgagcagaaattctcttattactgagagaaataatcctgatactctaggaagtatcctaaacatgaatgataacaatttaatatgaatgtgtaatgggaatagtctgtagtcaggtagcaataaaaagtaactatagttacagacaattatgcacctacctctttattttctagcacggtggttctccatttagctaacactcctccttttaatacaggtcctcatattatgctgacaaccccaaccataaaatgatttcattgctgcttcataactataatttgccagtgatatgcaagccctgtgaaaaagttgctcaatccacaaaaaaggtcatgaccacaggttgaaaatcacagttctagaataattaaatacaagtttgtgttactttgagatagtaacagatccaaataattgcattttaaaatgtttaaatgagaccgtcatggagactccaagaacatgaaataaaatttgaaaatataggaatatattatttctcatagcctgatattggtacttaaaatgtagtttctatgactctttgcctttatctctctatacatacacatgcatgcataacatatataaaatacatatactcatttattcatgtgcattaagtgtattgctctaagcaatttagagttgtatttatatctaattttaaaacttgactttgaaaaattcagtgtagcaactctttcctcatcttaagtatatatagaatggtgctatgtattctatgtgtaggacttttctaaggttggtattcttttaactggtgatagagaacagtagcttccaatcttccatcatgataaaaaatgctctcagaatgtccttctcacacagaattttgagcataggcctcattgtctttaaaaagatgtagattcctggaagtgagctcattcacttcagaagcacatgcttttttgtgattgtttcagcacttgttcccaaattatacctcagaacacacgtgataatttacattgcaccagaatgggatgggtgtgacgtgtttccctcatttgagaaaaggtgaaatgttaaaccaagtttctcctgaaggaatgacctatagaactttccaaccagaggcaagtgaaccagaagcatgacagaatagcagagcatgacagctgcctgagttttcagaataaatgaaagggatggggtctatgaactgcttctcaataaaattgactatgaaccctagaggaaaagaaacgcttggaagctggaaattgtattaattgttatcttactaatgattatccttttttctctgctttggcaagtaacttgaatgactaattaaaataatactagagccaatttaatgacatttttacctcctgacagaaatatgtttaattaggtgccatagtactgatcacatctattttaagagtgtctctcaatcttcctgggtttggagatccaggcaactgtgtttttttttcatggtattttttaatcattcaggatgtgaagtaatgactcattactaagattgtctatatatcacataagtcaatcactgggatttattggtctaaaataataacactgtgagaaaaatttgtgggagtaacataaaagtgatgaatcactgattactttcaaatgctatattaataatactaaaatcttctcatctcataggattatgaacttgaaaatgaaatctcactgtctttaacttttctgttcgatgggatacattctattttcctacttaaggaaaataattttaaaatcataatcatgcctttctattgaaagatggaatctgatgattcactataaatgtgtacaattggtatatactaaaggatttaaaatgcataaagatacagaaatccttttttttattttttaacctgttttctttaataattatcagatggaacccatatactagatacatattttgtttctcatcaccaacaaaaacaaacagaattaacacgataagcaaacattaaggcaagcattcagatggtcatcccacacaatccttatattctgttctaaatgttacacatcatcaaattatcatgatgtaccctataaatatgtacattaaaatactacgttaattttaaacatagtggttcagaattacaatggaagcaggactacccatgctgcctatcaaatgagaatacatggcattgttctcttggttctgagtcagttgcagacagaccataccatgtcaaaaattcagctagaatgtctctgaatatgaatcctcaaaacaagaaatcttcctgttttataatttggttttggatatttttatgttttaagaattctaatggcaatatatgaactccaaggattcgcagaaacaatgagatgagagtttctaatttttcttgagatgggaacttaaaccaatgtatttcatctgaaaaaatgttaggtaagactataggaagagatgggcagtgggggaaaatagtcgttagcaattttgtactaccacaggaagaacaacagcaaacaacactgagatctatggaaatagagaatggggtaagtgaccactccaagaatggaggagcacgaggaatttatggtaaaaacagggaacaatttgagtctaacacctttgccaccaagcagagatttcttcttcaatccagctcaccactgaaaagaacttgctggcatttgaatcaaatatgaaaaggatggaaacaatggggacaaaggaaaaagacaaagataaaaactaaaatgaaaacagtactaagagagttcagaggtccacccctataaccttgtaatgcatatgagaacaacaaaggttaggttcagttggaaacgtactctgaattacaattcctaagatccatgaaaactgaatgttaataaaattggcatacaggaattgagaccaattcctacatacaattactgtaaggaaaaaaaagaagaattaaaactaaaacacttgttccaaggagtgctaaaatataccagataggtatatccatgaagtagattaaaactgttctgtagcatttaaaaataaattaaaagatatttcaaaatgatatcacattaagagcaactcactcaaaaatgagatgacaattgagaaattaggaatgaattgaaactcatttgataaaatgaaaaatagcaaaatacagtatataacaaaagaacaaaaaatcttaataaaaataaaagaagggatatatatatgtctatatatatatatatatatatatatatatatatatatatatatcaataaggagagaataatttagaggactttccagtattcatgagacagattttatcaacaacaatccaaaggatatcatggtatattccttttttgacgtcttaaacacatttcagacaatcaatattgacaggaccaatgactgacaccaaatatatacttatgattgtgatacctagtataaacaagaaagaaagtatctagtatgcaatgtagccactgaggacaaccaggaaagtcaacacacaccacattcttagagaatgtctgtctcttttccctagatcacagagtcataatatataatttatgagccttcatgtgtattgcttattatttggctccatcattaccatgtgagatccagggacatgagcatttataaaacaatgctatagccctagcatttcaaataccttgggatcacaaagtatgagctgctaaacagcatggagccactaagaatgaaagtatctatgtaagcagtttggactattttaattgatatagatactacttggcctgtatagtaaagaaaaacatttttaactcagtgaaaactcttaaagatccttgcagtggaaataggcactgtttttgaaatccagaaaaagctgggccgtatatccaccatctcagtaccacaggtacaattaggagagtattaagtgagcagaaagatgtcttgaattttaggttgtttgaagatatcaaaagcaaaaagtggaaaagaagtatgtatagatacaacataaagcaattttgtagaacagtaggaacaaacgtatgtctctattccacactgctcctaagaaattatttttaagatgctgctctctaaaggactcttttggcaaaacagtgaaaaaaattcatttgaaatttatattactaaaaattatctccttctgctatgcagctcagggaatttttttgtgaagcaagcttcctactgaaagacaatattcacttcaggtgaaagggattcagtacatattgttcagtattggatgttatagattttttatatgactttaaaaggagattcctatcccctatgtcatagatctgaatagtttttttatgtatgcaccccatcttcctattttcaaaatacccatagagatcaattgtataaatatcaagcttcaaacatctttttcaaaggtttttaatttatttttccaaaagcactccactcttctccactctgttattcctgatggcagtcttgcaatgcagactacagtttatttttaaaaatacatgtttttattacattttttatttttatttttcaactttttatttgaattagaaacaggattgttttacacgacaatcccaggtcccttctccctcccatcttcccctaccaaccccccaactaaaaccctacctatcacacaccctttctgctctccctggatggtgagtccttccatagggtgtcatcagagtttatcgtatcctttgggataggccctaggcccaccccgtgtgtctaggctcagggattatccctctatatggaatgtgctcccagagtccacacctatgctagggataagtactgaacttactttctctgtgtgtgcatgtgcacatctgtcacggcatgcacgtgccaaagacacacatgtggttgtgagaagagagcttggaattgtttctcaattccaccatgaggggcttggggattaaacacaggctgtcaggttcagcagcaaaatgcattcacctgctgagctgtctttttggtccaagtacagacagaattaacaggttcaaattccagttctggttgggttctaccaatggggagccccagcagggaatgagaaggaaatatatgtttattttccttaactttctcccttaaagattgtcttgggctgactgttttcaagcaaagccattgttcttgagtcaatgctcctctaaagggtgaaggctgtaccaaaatagctcctatgaaattatatattattagttaaatgtgcatttcctagtgttatttaatttgtatttccagtgaggttgaccattgtttcattcctgtagctttgttcattttttctataggattattcaaccttagagtttcagaattgcaatatattacaaatagtttcttttggtttatggcttgcctcttaagttcatttattgtaaacaaaatttaattttaattcaagaagtaaaaattaccagtcttccattataatttgctgttgtttttgttttatataaaacattcttttcttttttaaattcaagtattaaaagtttcctatgttttcttcacaaatactctggatgtttaaacttttcaacatttattcattcttcaaactcttctaattcttcagaaacatcaataaagaaaattaataatgcctcatctgctgtttttcttatcactattttgatttcatgtaatatttcattttgtaagacatggtattaagcttaatgctaaaacattgatattaatttgaatatgtcacttatctgccttgtttttattgacttcccaattatgtaacttcatttttattctacaaaactcagctgattatgaactttttcatgaaactgagaaaattaaacctttgctaactgttttccaaattacagaattatacacattttctaattgatatttaaaattgaattacatgtttaaatatgtggtaatattagttttctttcattcatagaccaaatatttattggtcatcttggtcagctttgtatatgaaaatctgtctttctgagagtaaaatccaagccacattatcattcaagagaagaaaaacaataaccatttattttctgttttaaaattgctgctagtaaatatttctgtttatagccactaaaaccccaagcaaaagtatgcaaatgtccacaggattgtatctgattatattcttgatgtcaattaccaccaaaagcccatggctatagccagtaataccaatattttgaagaccatatggtaaaatcaatcaagtctgaaccatgaaatgcctgaaatatccacatcattgctttggtcagtcagtcacttgggataccatattaattgatttacattgtcctataaattctgtggtggatacatgttgttataatttaaaacatcagttgtcaagtgatctactttggtcatggagctttgatgaggaagcacataaaaattatcgtgttcacattgttgccatggtgaccattgtgataaaaagaaatgtggagaaatatggatcataaggttgtgttttcaaagcacaagtaataaaacatatgtttataataaagatttgttcccactgggagttaacttatgctcctcgtgtgtggccagatgtttcagatcacttttttttttttagtaatctgcaagtcacctacattggcaaacagtgtttctaaatactagtcggcatgttctgcagagtattttcaattgtttccatgtagctatatgagagaaaaacctctgaaatgttgttatacacacatacttagcaaattaataatgattacttgtttactgaatgaaaggagtgaaagtactagagtacaagaagaaatcacttatcaccatcctgaatgtccattgatcagagtagttttaattacagttgagatgtttgagattttgttgttttattttcattgatttatcttgttattgacaatttccttcatttgtataatgtattctgtttatttactcccttcaaccatcccttatctatcccatctggaccaacttctccctccctatctctggaccaatctcttcctctctaacctataagtcccatccccagcttcatgatttcacatattgatgcatttattttaactgaaattatctgtctgatcattagattggaactatccattggaggctggtgaggtcatagtgagtatacaattaaagacaatgattgtctctgctcctgaacttaccaatagaaaatagtttcgttgtgaaggggagtgtcccttgaacactttccatatctttcctgactgttcatgtgaagtcattcctatgcaaacacaatgtatccacagctgcagtgattgcaatggctgtgtcttgtccagaagatgacattttgcaacattttctacctatcttgtctcttacattcttttcaaccttcttctgcagtgttccctgagccttagaggggtggtgtaaatgtcttatttatagcttactactcttctataacttatcctaagtactcttgtctagccatgagtctgtacattcatcactgttcaccagaaatacaggtggcctgcttgagactgaaaggaatgtttgaatatgggtagaagcatgtaagggtttgaatttacatagaatttactatttatggcacatttacatattttgttttctataaaattgataatacatttaaagctaactgattttataactacctggcaaaatatacctttcttgcatatgattcagaataggctaagttatccaataaaaataatacataatcatgaaaatataagtttcataaaataattggcttacttctcatttattttatttgtccatcttgtcctgcttccactacatgaagtcttcatgaagggaagcatgttgacaatgaagctagtctccacagtcttatgacttggaaatcagaaaagaataaattgtagagttcaaaagaaaagtctcatattttatcagccatagtaaaccaacaaccatgttgaatttcaagtaagctggaaggtacaactctacatgcacccagaaggaggaaaatcagaaatatcacatcaacagcattcagcttgcataacctgttagaaagatcacaagatgaaaggcagaatctttgttctctttgttgacagtctacctgatcctgggagccagatctatgtaaattgctagagtggtgtggtcaatacccttggtgcaactcttcagtctactgaaacatgagaattggcacaataataataattcaaatataaaaggaaagtatatgaattgcaagtcctcagaagttggcttattcatccagcttgagctagtaggagaatttggaaaggtgtaattttggaacgcatggtgctgacgctgtttaggtgatgttgataaggaatcagaggagaatatgcacagaagtcactgtagacctgaattgaatttacatgaattcagttgcaagaaaattagccatcggggagactttggaatgagaaagtataagagaggttcaagatgagagagaaaaatgggaagggagagaaaggaaaggataggtggtaaaagaggagagagacagggaggaaggaggagagagaagagagagcaaagtgggtagaggagaggggagggcctgagagggaaggtataccaggctttttttggggggggcaccaaccagctctcaaatcatgtcatacagacttattactagttttcaatgcttgccctagctttgtctcatgcctggctagctctttttaacttaaattaacctgcttttctttatctgccttttgcctcagggcttattacttttctcacttctgtatatcttactttcactgctctatgtcgttctgtctggtgtctctctgacatcttgccccaggcatctccctcattatcctcctccttcttctctcattcttcctagttctctcttgagcctaggtttctccccatatttattttctctcctgacaccccaacccatcctttctcctgcctagctattggccattcagctctttattaaaccaatcatgtgccttaggcaggcaagatgaaataaatgcaacatatatttacataattaaacacacatccttacatcattaaacaaacgcagcatagacaaatgtaacacatctttgcacagttaaaatattagtctgcagcataaacaaatgtaacatagctttgcctagttaaaataatattctacaacatttccccattttgtctaaatttttaaaaaaagttttaactttaacatagtaaagctaattacaagaagagttatcaagtaaggattgcattcacaatgtccagtgcatctgtatttggaaaactcagagaaaatactcccttaattatcctctcttgatgaatccagagctctgtacctaatttaccttctatcataactgaggaaaactattactgcaactatcatctttaccttcatcaaagactgcagaaagatataatatcatctggataaataggaagttcagtgtaagccacttccaaacctatagaaatgacaaatatatggctgcctaaacagtctcccaaggttcctctgcaacattgtggcatccatcttcagcctaaaggcctagactatctagcagacttttctatgaggtaagaattttgaaggactgtcacacctagtcttggcaaagttaagccttcactttccttatgccctgaggaatgtctggcagacttttttatgaagcaggaattttgaaggccttgttttggtgaagtttgaaagtcattttcctttgtgtcctacttacccagtttgtagagcataccgtcagagtcaaggcacaaagctcaaatgactagttttgccacaatgaaagcaaatctcatatgacatcttttcaatgtccatcatctttcctgaagtaaataggtgctaataggaacagacatgtctcattatcatgaaaagtcctacattaataaaacacttaaaatggcatattctgtagatctttgaagtgtttgaagacaatatctatctaaaatgtatctggaaaacacatgtaacataagtacaaatttgattgttatagatgataagctaccaacctgcatttattaattaaatgttacattttaaaatgagttgcataagcacaatacccaaaacaagaatagaaacctatatatggtataaaaaaaactttaaatttgtatcaaaatacaaatataccaatgcaaaatatttgaggttaatgcttttctttttatcctatatttctatgtctccactaaatgatggcaaacatctataacccatagaatgatcaaaaaccaccttcatcacctcttgggaatgtcagtgttgtgttgtctagactgcttcctgttatgtaggggtgaagtcatctttttagggaacctgagaaaattgggagagtgttagaacactctccccagagtggtataactagcaacatatgttatccagtctctgtgcaatgagaaagttcaaggcttatctgcagtcctggttggagtagtctgtgaggctagaccatctcagcaagcagccttgaagcttttctggatgcagaactttaaggaaactgcaacagaggcactctgagaggctggatcacctggtcatttgttttcattggtgtctagtccccttgttatgaaaactcgcaaatctagagcctagtgcaatgtggggtcagagctaaattgataacaggtagtttattaaagaatagtactcacacaagggagccagtgaccaggtttagacaagatgcttgcttgtccgctcagccaggcagaaaagagaaaaaagggcccgagtgcatgcctcccaactatttaaacccttgttacatcactctgaccacgcccaagtgggcatggtcagagagcctgtgaccagccccaaacagtcgtggtcaacagtacctctaaccaggttttctccttacaccaaccaaagatcatatttgttttacaactgagcaggttaaatatacatcacttgccttgcagtttttctaggtttatttctttatgtctgtagccaagattttcagggtgtctttcatgatcaaagctgattatcattaacctggaaagaatctacagcctctcctttcctgtggaaacacaaggataacctcttccccatagcaatacatgttttgacttccattctaaagttaaggtattcttaaagtatctaggctagtttatttcagcagtccctgttacattcccatgcctctcagaagctgtccttttcttataagcaatcataaaattcaaagacaacacaataccctacaggatcaagacaccctgtgtatttcccatctctatgtgcttattcattttttataagttacttctctctttaaagactctgcttcattatttatgaactattcatttttctatgactttctgcagcataaacaaatgtaacacacctttgcctaattaaaataatcttctacagtatggaggggaagcggggagaggagagaagatgagagaacaagggagggagagaaataggggtgaggagaggagaggatttaagctagtgtgtgatccaattctccattacattaaatgagtcacatattgtaggggaacctgtagccacgcctgcttaggggctggctacaggtctgcctgaccacgtctgtgagggcatagtcatggtgatgcagagtaagagttcagttggctgggtttcactttcagttttcaccctttcagcttgctgaacagactgctgccacaccggctgggtaggtcgctctgtaagtaaggcttttcatatatatatatataatatatatatatatatatatatatatatatatatatatatacttggctccgcattggtaatttccccactttaacatatccttgtgggaatgtgacattgaagacttgaatctgttcttccaacccctgttcccaatcgccttccatctcttaaagcaccaaataggagtataacaggaaatttggcatgatgcaatgttaacaaatgttttctctgcaatctgatccttaaatctaagccaactgcctcaaaactttttttgattgaagcaactaggttttttttcacttaaaaatagcaacaacaaaaccatgtagaccaggctattctcaaacaccagatccacctgcttctgcctccagagtgctggtgaattggaatgtttagggaagcttgtgttccatttcacatatcctacataaaaatattaattgaagttatttttagatttgtgccataaatacctatataaagaaacataggggaagaaaggattagtttggctcacattttaaaaggatataggccaccatgggagggaaggaattgggaaggctgccccattgtggcaggagaagacagatgggactcctctttatatttcaaccagaagagaagaccaatgttccttgctcacctggctgttccctttaccccttttgttgagtatgggacctagcccagtagatggtgctaccatttaaatgaatcttctctaccccatgaagcctctctgcaaatgctctcatagaaagatgcagaggtgtttcctaggtgatgctatacatagtcgcattaatagcctatatattttcagtgttcttagagttatatgaaaaaaactacatctattggactagtaagtttatctattggagatgctgctcgtaagtcttatcagcagtgtcttttaggtggtttacaaaagaaatttgactatttttgatttccaacatgtgttttgactacaagcctaacttgcataagaactatatatacctccacatataagaaacatcaatccccaaagtgaggaaggctgaatattagaatctttattataaatatcattcttaaaactttgattatatttatattatttgtggcattttaacgtgctatatacacaatgttaataggtaaataggtacatatatgttgggagtatttttcatcttttctttttaatgtgaaatgtatgctcagaaacatttaggcaccactgcataacccaagtgttcagatgtataaataagcataagaatcaataaatccatgatttgatttagctaaatggcaggaaggatacacattgggaaattctggggtcatgagatatagttcggtcaaatcagttgagactggatataaatgatgtacctgtcaagaattatacagattgacaatgccaagcattggatctgagaagaattcccaggttacatcttggtatagaagagaaaatatatgtgattggctaatactgccctgatcagtggcagccttggtgtccttaatcatagttaatgcctcagatctttaaataatagtgatagctatgatttggaggactaagaaacaggcatacgtaagtgattttaaactgctgaccttattttgtttacataaaagctacctactaccttatacttttcaaatgaaaggagccaataattttccaatctgatgctgatttctatgcatagaccaaaacaatttgacaaccacatgattaatttgatctgtgtagggaaaacaaatgcaaattaagacattgtttctcttgtataatatgagttatccaagtaaatcatggacgtattctaagtcagttacacaatgtctcaacatgcctgaggttaaggcactaaatccaaatacacctagaaacaacctgagactgtaaatggagttgggtaatacattcttcctgcttgtggttctggttagtattggttaacacacattgcctgcttggcgttatagttttgaaaatgactagggcttgttgagtttagacttggatgaaggcatttttctgtgagaggaaagagtccctgtgtaatttgtcatttagagaaactcacttttgagcatgaaaacaatagaagttatgttgcctcttaaatatttattggctaaccagttgaacttattgtatcagtgaagttatagttcaattcaaactcttgtaaaggcattttatccaaatgatcaatagcaaagctaaaacttctacatcatactgattaattagcaccaacaataaacaaccatgaacaaaataattaagtatggtaggtattcatggtttcgactaaatttcttaactgattctccttaatttcacagatgattttctgttagaaaaatgcttgtttcaagatgctttaggtaatttttgataaattcattgtaatcttcttcaaagatattttgtatattttatacacacacaaacacacagacacacatacacacacacacacacacacgcacacacacacacacatatatatatatatatatacatatatatgtatatatatgttaacatagacaatatactttactcattagaatatggaacttttaattgagaaaatactctacctgcagatttctgggacttctaagctcacagaacactgatctggatgaagaagattataaggattatttcattattcaactataaaagcatcttttaccaaacattttcaaatctatggtcttttctgtctcttcatggagtactttctaaaactatatatatatatggtgtgtgtgttggtacatgaatgaaaaactgtgtatgtgtgtatccatgtgtgtttgcacacatatagttttgtttgtttgtatgtatgtatgtatgtatgtatgtatgtatgtatgtatcggtggttggatgggacagaggttgacattgggtatcttcttctattaactgaatcagaatatctcgaagaacctagagcaagcctgtttgggctacactactagcttgccaggtgtcctcagagatcctttgtctgcttccaaggcattggcattatagacacttcccacagctcttaaatgggtgcttgggatctgaactcttatcttctcacttgtacagaaagagctctatccactgctatatcccagctatagaatattttttaaaagaaaaaatcatcaactactggacatgggacctgtcctgcagtgttgttgatatatccaatgccatttcactggagaaaactgatttttatctccaaatctattgcaaatatattcttggtgaggggtgggactttgtgcccactacctcttctccatactgggattctgtttggattgacgtcgtgcagagttttgcatgctgtcacaatttctgtgagtttttattctcataatccctaacgtgattggaatacactgtttcactgggttcctcttatgacttctttcacatagatactcaagccttaggggtgagggagtcaataaagacatccattttagtgctgagtgtttaagtgtgtctcataacccctagtgaagtggaggcagtaattaaaaatattccaaccaaaaagaaatccaaaaaccatttgtattcagtatagaattctaccagactgtcaaagaagaattaacttcaatatttctcaatcattccataaaacataaacttaaggaacatttccaaaatcctttcatgtatccacagttaacctgatatcacaactacacacaaaaaatgcaacaaaaagagcaactttagaccaatattcattaagaacattaggacattttcaataaaatactttcaaaccaaatccaagaacatatcaaaaaatcatctaccatgatcaatgttggctttatctcagagatgcagagatggttcaacatatgttagtcaaccaagataattcatcacataaacaaactaaagacaaaaaacacatgatcatcccataagatacagaaaagactttgggggtgaaggaatccaacgtctctttctgatagaagtcctggatcaattaggaatacaagtaacataccttaacataataaaggcaattttcagcaatcccacagtcaatatcattctaaatggagagtaattcaagatttccactgaaatcaggggtaagacaaggtgacccactctcttagtactttttaatatagtacttaaagtcttagctagttaaataaaacagctggtggagatcaagagaacacaaacaagaaagaagtcaaagtatcctaatttgcaaatgtccagagatccacaaagaatctaggcagtagtggagaggccacctttgatgtccttcccctataatgacagtgatgactaccttacttgccatcctagagccttcatcctgtagctgatggaagcagaagcaggcatccacagctaagcatgagccatactcctggaatccagttgtagagagggaggagggatgagcaaaggagtcaagcctatgctggagaaacatacagaaagtgctgacctgacctagtgagagcactgggatcctattcataaagctggggaaccaggattggactgaaacaagtccttgaatgtggatgccagttaggagtccaaggcagtctatgcaagctttaacagtggaactagtacttatccctagtgcacacatggactttgggaacccattacctatggagggacactattgcaggccagatacaaggaggagggcctaggccttcccccaaatgatgtgacagactttgatgatcccccatagaaggcctcactatctttggggagtggatgggggtgagttcggggggttggtagggggcatgggggggtggagggagaggaaccaggggggattgatatgtaaaatgatcatttctaaataaaaataaataaataaaagaagaatgatgaaattaatataaaattgctcttaccaatctatcccagtgccctcttcttagctttcatagcatgccctgtgcctgagtttttgattctgggttattttgatatggagatttgtacatttgttcataccttttccctcttgtggaagctaacatcaactttaacttttgtttttatatctgtagaactggacagataattcagggtcaggtatatactcacagtcttctatttaaagttgaaaatttcacctaacacaatgttttcaaattttatgtagaagataccctataccctttctgatgatagtcctcaggacaggcaaaaccactgggagatagtgattatgttcctagcatatacatatttttagcattctcagttagctttttgagttgattgcccccatccccacttccctttccaatacacctagcactgtgtgtgtgtgtgtgtgtgtgtgtgtgtgtgtgtgtgtgtgtgtgaagctgttattgtttttaaaaccttgcatttagatgatcaaatgcacagtttcacaagaatcttgcattctgtggggtccaaatgatttcagcatatgaaaacatcttactgagcaagactgtaaagctttggaaaacatgaacagcattttcaagtaaatctgagtagagtagtttttaaatttgttttgttttgtttctctcttctacattattattatttttacatgagattttattttatttttaattcaaagattttcatataatatgcatttgatcatgtttcccctccctcaactcctccttgatctgttcttttccctacccactaactttttaatggaactcatggacagtttaatacagatggtcctcaacatataatttgaaaagttttatttatttttatgtgcgtcaatattttgccttttctatctgtatgtataggtgtatgtaccacatgtgtgcctggtgccctcagaagtcagatgcggtgtcagatctcacaaaactaaagttcagattggtgtgttattccatgtggtgttgggaatgcagctgcattctctgtaagagcagcaattggtattaatcactgcaccatcttaccagcctctcagtacatattcaaatacattagtacttaaatgataagcattctttagttactttagtcaagttttgaattttgaccttgtccccagagactcatgataggcagaatagtaatttctctctgagctgggcagcagcagggagctgcaactactagtcagtcagattacttttaaaaatgcctgatattataaggtgtgctggctacttttgtgtcaacttgacacaagctaaggtcatctgatagtagggaatctctgttcaagtcaggatgtattttatgagaaaataatctattttcattttcaaaagaaaaacaaatcaaacatatcaatctaaagaaaacgtaagctccataaaaataatagcatgtgttatgagttcccagctccttcctcatacttggtgatatttcacatccttatgcaacccttcaggactagctgtcagtctgacagactcacatctatcatctcacctacctgtcactcacaggagaagtgttctgcatgatggttctgtcatctttaacactgaattgcttctgtatttccgcagaatagtttctggatcaaaaaaaaattaaggtaaaagaaaaataaaaaggtgaaaaagattagaaagaaaatgcctccataagatcaggctataggcaagcctgtagggcattttcttagtgattgatgggaaaggcccagcccattgtgggtatcgccattgctggactggtggtcctgggttctataagaaaacagtttttgcaagccatggggaggaaaccagtatgccttcagattcctgccttgtttgagttcctgtctgatccctttgatgatgaacagtaacatggaagagtgagcaaaacaaaccctcatcttcccacatttctttggtcatggtgtttcattgcagggatagtaaccctaactaaggctataagatattccctgttgataaactgtgatgcttggaggtttaagtatacaaatgcattgtttactgagggtatttaaattcatgatgaaatccagataaattgtatccacagtaaatctgtatagttaaatcccaattagaattattcccaagaccttcaaaacttaaaacgcaagtcacttttttgacttggctttggtttaagtccaaaaaaaaaaaaaaacttctctaaggaaaatgcccctcaggaaaaaggtggtttcttgtttgcttgtgtttttaattttgtctggaaggatgaatggtataaaaagtgaaaacaggtctgtcaacaccacaggaagacgggagatagtgattatttatcacaatgcagtatagtgtagggtgtttaatgcgtcagtgaaaattcagacatattaccccataccttgtgcatcttgttttccttaggagtgagctacataacatcttccctactcatagaatgatgtacaactgtaaggtattaggagtgatttagtgggtcaacatcattaacatttcaaagcagaaacaaaggaatgaaaaaaagtccagcctggggaaatagctctggcggtatctctctggattaaagagaaagaagcaagcgttgggtgtgcaagaatgaggacctgagctcaaatattcagaacccacataagagctggatgctgcaatacagcaaatttgtaatagcctgcctcggtcaacatggtaggtgaacactaacaactgaggtcatcctctggactgcgcacgcgtgccgtgacatatgcatgccggcattcacacacctgaatatacatgtatgtcactcataaatacaacaggaataaataaaaaagaataaagaatctaatacaaatgacaaattaaatgaatttttaatagctgaggcacaactaaaagtatttctagacaaaccgcatcactaaatattcttgctttaaagggctgtttttgttttggcttatattgatttcgagacagggtttctctgtagctttggagcctggaacctgctttgtagaacagactagactggccttaaactcaaagagatcggtctgcctctgcctcccaagtgttcaaattaaaggcatgcaccaccaccatccggcaaagggttgtatttcatttgggagtttatcttgactaccttatgatattatggtcttctggtccataggggcaggagtagtcatttcttctcctgtcaccaggaaattcacatataagaaacatgtcccattggaaaacttaaaaaaacgtaggctgtctaagctataattatattgtttaagcaaaactgtacctttgcttcgtggaaaactctaattagatgttgggagcaaagatttgaatctgggtcaaagggacagaatgagatgaagccattgggcttgtatatggctttgaatttagagaaagaaaaggaaatcacagtgtcaaggatatcttcttgacagcttgcaaaagaagttacccatatctgtggttccaaacagaagttaagagcttggattaattagatatgccgttcccacgttcccaagagtcattagagttattagagttccaggtaaccactccattaattcctttgtgtgtgtgtgtgtgtgtgtgtgtgtgtgtgtgtgtgtgtgtgtgtgtgtgtttaacattaatatgtctgaaaaactgataaaaggtgcggcgtccacccttgaccagcaagaaagacgccacaccgaggaatcttcttcaaacacagtttaatcgggaacctctttgctttgtacaatgtataatggcggcggccccgggccgagggagacggggcttgatatagtctacatctaccaatcacctaaccctacgtggcgcgccaggataggttgtctccaagcagaattaagaggatacatgacctttgccttatttggagttgtttaccacagagagcgctcgccgtcgggctggcggaaggcggaaaccggcgccatcttttgggtgcggttttctgcagctccctacaaaaaggaacatgagttaaaatcaaactctggcatcagagagtcctaagattgaaagagaaataatcaaagatttgtttattttccattggagagtaaggaatggctctaagacataattttaatattaaatccctattttatatgttttctatattcctttcatatattgttctgccttatatagtctatataggtcactggccagcctatgccctcagaatgactaaagaatcatgatttatggcattccaacagtcctactctcagctcaaagatcagcctattacagcgtttccactttccacctacattgtcaattccatattttctggacactttggtccagcaaggggtatggaagaaaacaggttattaatccaattcacagaaggatttgaaggtgtgatctttaatatgacctcagatagctgaagctttgaaagaaccttgttaaataaatccaccagtgacatttttaggacaggtttcaaggagaagagggataatatcaggcattaatagggaaagagatttagtggaaagcaagagaaaccaaactgaattttcttggtcacctggttctcacatacggtaccattttggttttagagacttcctagggggtaacagaaatcagttctttttcaattgaggctttacttcaaagctattcctgcatttacacacaaacacttaagtgtgaaataggcatttccttctaattatctaatcatagaatcagcaagagatcagcaccacagggcaaaactaagacaaccatattgattttgaattttgctgagcaacagactaccccaaaaatactgtagctttacatgataactatttgttttctcttgctagataagcagtttgaaactgactcatttggaaggttctcatcctacttttgccctgagttgtcccaatgggacaacaattaaatgggacgtagatgacctcattcagtattgctgtagtatatggttagacattttaattctcctgtacatgacccctcacccacctttttctgaatctttcacatagcatcatttaattcaataatgcaaatgggagaaacttcaaggtctgctctggtcaaatcctctgaacacataacaatgtcaactgcttccatctatcacagtttttttaaaatatagtttgtgtcttgtatccattaatcaggctgatataagttatttggaatctagttgttccctatgccatatagtatgaaggtacttccccatactacataacctatgatagatacagcagagtctgtgtctggctcctcatcctgtgtctcaggaaccaaacatactcatagcatctgactgtgatgaatcttcatattaattaatttttctatttcatgtcctttcccataacaaagcaaatacaaaacactccctggaaatcctagggttaggatttatagttagcttattaaaatgtataggcagttcaaaaggtttctgaatgattttctctttggtgtattttctttgtgtctccatagggtgttctttttacttgtataaataacacataagaagaacttctgttctaactagaaatcatgcttctgaggactggggtattagcttgttaattatcccattttaggaaaatagaaacatagattgcatagttttcagactatttcaggaatgacgtatgatctgttgttttttgtttttttttttctgattagtagtccatagtggtacttttttgaataattgcaatcactagaaactgcattgtgtctctcctaaaattgctgttttaaattatttaagcaaaagtgataagatacttgtttcacacatttctcttgtattgacttgttcaaatgatgcatttagctggtttcctttgggacccagatttagaaatcttaccactctgaataaggccttcaaagctgtttttctagttgaacatattattcaaattattagacgaaaagaagaaatacttacaggactattttattagttcttgcaaaaaggacatttatgagtggtgtggttccttgtaatgcttctcttccttgcccatgaaggactgtaatagctgtgatgatgtcctgagttgttctgagtgttctggcatcaagctgccaggaaaaataagatgatcaaagactatctatacaatctgacactggaaccaaaccttcaattttgcaaaacagcaaatagctgtgtgaacttcaccctccaaacagtagagataatggatctgagggaacagagcgtatgatacagaaatagaagataaaagatgtttctggatacaaaaaggagatcttattcctttaggtctctctggcatcaaattcatcttcatccctatctaattttgtgttttcttacattttgtctttaaaataaaagctctgattggagacttgacaacttttcctccttctaaagtctaatttgtaactctagtccacatgggatctttatctcctgtttctatcccaacagtgcttattatctccaaaatctcctgcttccctcctggttctcatatgcatacatttcaattttaacgttgtcactgtctccttctgaaacttctcctctagatttccaggatgagttttctctgcatagccacttgcactctgggtggtgccattttccaacatcactcctgcaatcctcacattttctaactgtagcctgtttgattgtctcattcgttctcatgaagttaatgtctttagctttcagacttttctctctagccattcttagtttcattagattgggacagccttgtgcttataactttcacctagaattggaataggcaccccaaacttgacatgtccaaaagagaattataaactttgactccaactttctatctgcactgtctccagtttagaggtgtgtcatcactataacagctgactcaaatcaaaagtatagatattagcttgtttactcccactctaaattaatacactaccaactcctccctgctttttcatcagccctgtattgaaaatccacctttttcttctatctcaaccacttttcctactccaaaatattctcattcatttcctgaacaactgtgttagtctcctcactttgttccatggttaaatttctgttgttgtttatattttaaattattgctattgattattttgtaatactttacttttagtttttatttcattttttactttttatcgaaaataaattcttttctcatacaacatattctgattaaagttttctctccttctactcctcccagttcttctctatctcccctcccatcaagatccactccctttctgtgtcttattagaaacaaaaatagacttctaagagataacaagcaaaaactctcacatccatgttggacaaggcaaaccaacagaacgaaatgagcccaagagaaggcagaagaatcagataccagcttgttcacacactggggaattccataaaattactaacctgaaagctatactatatgcagaagacttagtgcagacctgtgctggccctgtgcttgctgctttagtgagtgcatagcactttgttcagtagatttagagaaagttgttgttgtgtgtactcagtctgctctgggtattacacttcctgactcctcttctgtggagttccctgagctccgaaagaagggatttgatggagacatcccatttagagttgtgcattccaaggtctcattctttctcccaccctgtccccacccacagtgtgtgtgtgtgtgtgtgtgtgtgtgtgtgtgtgtgtgtgtgtgtgtgtgtgtgtgtgtgtgtctgtgtgtgtctgtgtgtgtctgtgtctgtttgtctctgtgcttgttccatctgatgcaggaggaaacttctctgatgattgaataaggcattgatttatgagaatgccagagtatcagtagcagtcattttaccatcactacttttttaagatcagtaatatttagctttaccctatgtctctgagctacatagtttctggttttttgatcacccaagaagtgtcagctataggattcaactcagggagtgggccataagtcaaatcagacattatttggttactaccacaaggtttgtgccaccattgctctagcatattttgcaggcgggacagcattgtagatcaaaagttttgtggctaggttggtgttttgattcccctttttgtttaaataacattgttttcatttattttacataccagccacagttttgccttccctcctccttctcctgccccagtttttctttccataacctgcagagtactttcccatatcaaagacattagaacgtgggggctaaaggttctatgtaagtacttactcaatttctcccatgttcaatgagttgtgtggctgttgtcttcaacaacagagccttgatgtcatttatggagagcatcctgtagtataggcaacagctagggtttgtttgaggatttccataagacccctttggccaataactcatttagatattaacaattcctagtattggaagcttcaattttggtgacaaaagatagtcacttgggacttcttcctcattatttggcgacttcattaggatcaccatcatatatactaggaagtttccaattcactaggttttcataccaccccatgaattcccctcagttctagctgtctccatattctctccatcaaccctgtataccctaccgctcctcaactgatcctccagctccagtttcctccagctcacagtccatcagcaaagtgtatttcaccctcccagagagaatcgtgtgtctactctagtcccttcctctgtacctaaccttctgggtctatgggctgtataatggttatcatttacttaaatggataatagtcacatataagtgaatacatgccatatttatctttatgggtctgggttacttcattcagaatgattttatttttaattccatgcatttgcctgataatttcaggatgtcatttttaatgagctgccctattgtataattttttcttttgagggacatctagatttttttctaatttcttgttcttatgaatagaggtgcaatgaacatggttgagcaagtgtccttgaggtaggataaagcatcctttgggtgtatgcccaagtctggtatagctgtattttgaattagattttctgagaaccagcatattgatttccatagaatttgtataagtttgaactcccaccaacaatggaagagtatttcccttgtttcacatccttgccaacatgagctgtcacttacattattaatcttagccatactggcaagtttaagatggaattacaacatagttttgatttacatttcactgatggctgaggatgttgagatttcttgaactgtttctcagagaaacacctactgagaattctctgtttagatgtacacctcatttttaaattgggttatttgggagaggttttgatatctagtttcttgagttctttacatatattttgtgtattagtcctctattagatgtggagttggtaaaaaaataaaaacaacaatctttcccattctatagactaccattttgtcagaatgacagtgtccctttgtcttacagaaacttcagttttatgaggtcccatttattaattattgatcttattgactatgttaatggtattcttcaagaaagtcttttctgtgtcactgagttcaagtttagtccccactttctcttctgtcaggttcagtatatgtggtcttctgttggggtcgtgatttgagttttgtgagggtgattagtatggatctatttgcactcttctacatacagactaccagtccaatgagcatcatttattgatgatgcttcatttttttttccatgtgtgcttctggcttctttatcaaatatcaggtgtccataggtatgcgtatttatgtatgggtcttcaattcaattcctttaaccatgtctgatttaatggaaatatttttattactataaatttgtagtacatcttgaaatcaggaatggtgacatcttcagctattctggattgttctctctctctctctctctctctctgtcctctctctctctcttctctctctctctctctctctctctctctctctctgtgtgtgtgtgtttctataaaattgagaattgtcctctcaagagctgtgacaaattgtgttatatattttgatagggattgtattgaatctatagattttttttggtgggacagctattttttactatgtcaatcctgatactgtcttcaatttattcctttagagacttgaatcatttataatagaagtctttactctagaagtctttactcgctttgttagagttacccaaaatattttatattattagaagctattataaaaggtcttatttctctgatttctccttcactccatttgtcatttgcatataagagggctactgatatttacaaccagactttcaaagaagagataatgtcaatattttacaaaatagaaactgcagaaacatttcccatttccttttatggggccacattatgctaatacccacgtcatataaagactcaacaaagaaagagaattacagatcaatttcccttatgaacataaatgtaaaaatactcaaggaaatgctggcaaaccaaatctaagtacacatcaaaaagatcttccatcatgattaaataagcttcatcctagtgatgcaaggatgggtcaatatatgaaaatcggtaagtatattctacaatataaacaaattaaaagagaaaaactacatgcttatctcattagatgcagaaaaggcctttgacaaaatccaatggttcatcatgataaaagtcttggagatagtattgataaaataaaaggagcatacctcaacataataaaggcagttttcagcaagcccatagcctttgcagcatcaacttaagtggagagaaactctcagcaattccactaaaatcaggaacaagacaaaattgcccatgatctctatatctattcaatattgaaattgaagttttaactagagaattaagacaaaggaaagagaccaaggggatacaaatttgaaaggaaaaagtcaaagtatctttatttgcagatgtatgatagtagacctaagtaccgctaaaaatttcaccatggaactcctacagctgacaaacacttccagcaaagtagctgcatacaaaattaacctacttttaggttgttgttctttttaaataatatatatgtctgcatgtggccttgtgcacagcagtgcctaagaatactaaaagatggcatcagatcccttggagttgggattatgaacaggctattgtgagcctccaaaagtcgatgccaaggacagaactaagcttctcttccagtagtgctcttaacctctgagccatctttactgaccatgatactaaaacacacacaaatctaaaaggagttttataatgaatcttcgatcatgaacctcacctaatttcagaagagctcaacattctttcagccttatttaaagtgattgctgtaccatctaaaggtttttagatacatgctcagttcctagcaactgtatttataatagtcaaaacttctgtagggggaattccacacatcctttaacaagtaaatgattaaattaactggtatttaagcatacatgaaaaaaggtcaagacaaatgaattaaaaaaaaaaacttttgaggttggtatatggtttcagggctttgagttgacccacaccaacaactactccatctatgacttgctggagcccatgaagggaccagatctatggaaccatagctgcagagtacccatgactcagggcaacagcaggatatccaagaggagacttggtgaaagtccagtattgatggtgtagcagaagccagaggcctggaatcataccaacaactcattgcagtgaacatatacaagtaaagctatttgggtaaaaggttatagtgaccttgggaacacactgaagttcccaaggtcattatgacacacaaataagtgagggggaggaaggaaagacagaggagtgaagttatgttcttttaacttttatttctattttgtaaaatttttcttttgttgggggaggctacaagggtagaggctggacatggaaggactgggaaaggtgattggggtgcatgctgtgaaattcccaaggattcaataaagttatttaaaaattggattgacctcagtggccttatactgaatgaaattccatccagtatcaaatgtttatatgttgcacccttccattcaagtaacattttcagagacaaggcatagatatgggaaaaggaaagtggttgcccagtaggagagagaggatgggcttaacagtagaatctcaagtacaaagagtttctttctttgtgacgggagaagagttctgtggcacaattatgatgatggctgtactgtacacattgcataaaactatatacagctagtgaccaaaatcactgttaaaaagatcaactcttaaaagtacatgtgatgtgtgtgatcagattaagttgggaaatggagttaacattggtgggctcattctgggataatttcaccctataggagatatttaacaataatagctggaggcatttctgcttatcatatcccagaggaattgttgctattagtccctgatggtttgtgactagtagcattataaagcattttgcaatccataggaaagccatcttcaaatcaagaattatacagcacaaaggtgttagtagaactgaaacagcaagtccgagttagtagtactgtttcaatgtggatgttctgacttagattgcatgatgtggtcatataagatcttatctagaaaaaaatgagtagagtatactggatgtacagcactatgttttaggtctttattgtcatctactaattcagataaaatttactttgttactcctttgagtctcattgtactcagataaaatccaaagacctaatcacacagaacagaaagcaaaaacagttggcaacaaataagcagcaagccagattgcagagcaggttatcaccttagtttccccccctgaaagttgtataactctcagaatgagttctggtcttcatctgtcatctctgcttatctgcagaaatggaacaaatttctttttcctttggagtgccaaggaagactagctgagatgtcttgtcagtgctgcttatccattgcctactctgttacaataataagacctgggcaatgtatccatcccctatccataggactgaagggacactggaggttagacaggtcataacactggtcacttgatacttagtgattgttaccagaggaggatggcacaaggcaggccaagattcaggcacagctatggtgcttgataaaatgagtagtgggcactgcacccctctaatgtaaggaaatcaacacaaacaactttagattctctgcattttattacggcatcaaggttgtcaacagatatggaaacaagaatgtatttgagagaaaattctgttatacaaatattcaactcaatagagccacagatcagtacccattttaaagaaatcgatcgttgttacttgtaaaagttaattaaaagtagggagcttattgttcagcataactttaatgcaatttcacctcaacaaaattgttttatgtaatgtgttattcaatccacttttaaaaaaaaaatctgaatctgtgccaaatgtcttttatagtcttttgtcggagtaacagtccaaatgaagtctacaccttggtcactttgggtttaattcctatctctccccagaagtcccacctgcctagctactggatgttcagttctttattaaaccaattagaaggtgccttagacaggtgaagaaggacaagagacacatcttcacacagtatacaaaaaaaattctctgcatttccccgttttagtcaaataaaaggatttctctaatatcaataaactatatgcaataaaaacaattttcagggaagaattacattgacagtgtccagtccatttgtatttgacaactgtggcgaaataccctattatctatcctatcttggtgactacacaattttgtacctaaatcactttctgttataccttttattaccaacctaaaaataatctttttgactttaaaatattttcttaaacaacttaaccttttatatctctcacctattataaactttacatctcttttatgagtttcttttctgaatttggtaacaaggaaaactgtaaaactatagctatcgagtcatcaaccccatcagagacctgaggaggatcatttattaaccaagtaagcaggaagtacaaatcaataacaccgaagatgcatcttagtgacagagtgcaggcttggcctctgcaagggtctgagcacaatctaacttagaaagaaaagaacagaacacaaaagcagcaagggaccaaaggaacacatttcctgctaaatagcaacaaggagatgaacaaagttcttagcagagacactggaagccagaagatgacagaagaccttagctatagggaaaaattacacctgccaaacaagaagtctacaacagcaaatgttttgttttctactagaagttttttcattttccctttgagattaaaatataattatatttctctttccctctcctccctccagtcccccttcaaattcatggaatttttttttttactaattgtaattgtacacatagatgtacatatatatttctaacataatatgttcagtatgtacaatgttacttgtgtttatgttttcaaggatgaccctttgatactggacaacaaattggtgtgttcttccctgggaaatactacatctctcactcccagcttgcctccatttccttttgttctttgtatagtgtagagaccactacagaaaaccacaaccaaccaaaacgcagagttgtggagccaaatcccaacagttacatctataaaacactcccacaactaaagttcaggcaatattgcagaacagggagcagaacgattgtaatatccaggggatcaggaagtttgctgtgagattacgttgcctaatagtaacagaagccatacctgtaagtaagtgtcaccaatatgactacccaaacataagctgaacttgaggacagcagtgaacatgccaaactggatgggaaaaagcccatgaggcctcaactctacacaaagcagacatatatataaaaaaaaaaaaaaacacaggagaagaaattttcaagcaagtgaaaagtctgaattaacaataatcaacatcatactaaaaaaataagatttgttctccaaacattaaacaaactatacccaaatgtaaacaaaattatgtaaggaggaatgtttaaaagtcaaaattaatattaactatgcaattcattaatattaaaatcttatgggatttaatatatagaaacaaattgcatacgatagtaagatgtaaggtgctatttagctgggcaaagtaattaagtgattctataatccttgcactttctggaagatgaaaaattattaatttcaaaaaatcctaataaatcaagatcatatatcaaaatttccatggtaaccaccaaagactaatgagataatatgtaatgggctaaggaaggaagcacaactgaaataaaaatatagctaagaatataataataaaggaaaagttagggcaagggaaataaatacaagcaatactaagataacaatataaatccaaacacaactacagaatacatactgtaattaaaagctgttggtcatcagattgaatgaaagcaaacaaatataagcttcttacaaggaatatattttaagtataaaaatacactaatctcaatataaaagaaaaatatgcaaaacttaaccacataaaagcaactgcagttgtactgatggaacaaatctactagaaagtatgaagtagagactgaaatgatagcacagacaagatgctaataagagactttggcactttcacctaacttcatgactgtaaactgctgagacaataattcataactatgtactatgctgggaaatcccagactcaggaaatacaggaagttgactcagctagccatattctctataatcttgagctgaaaaccgacaggtgagaataaattattcatcactttcaagggcatactgggaacttaagacctgatggtacattgactccctagtactactggagccggtttcaaggacagcacctccaaaggcacacttttgatgacattaaattctgttcagttccttaaacagatgtaaaagatttttctttatcaatgtaatgaagatgctttcttattttccacataaataccatgatatgttatcttctccatgtcccacgtgggagaaaaaatataaaaattaatgttttcaattcaccctatttgaaggtgatagttttttgcttccaagatgattcctcggggctaatagctcactgggctgctattagctacatctccatcatccattcctaatggtgttttttcttttggtgggggtagcatttgacaatttgtttagcattcagctcttttgaaagctgataagaaagcaattgaaatagttcccagagtaataacttaggttgccagattcagatttcaaaatataaaagtggaaaaggtaacagttttgaaatggggactggatgttgaaggactgcatcaggcatgcaaatgactgacagactttgaaaaggagactgtcacatagccaacaaagacaaatactgacaatctaagggaggaagagtaaaagaagaaagcctgctagacactcagatgcattcttgttggtttcacaggagagctttgggtatattatctcacattcaatacataattcttaaaatatcactgtcacctgtgtgaatacatggaacaaacttaaatgagttagatggttcttcaacaagtatcctccaaaaagaaggagctggaaaactgaaattagtagggaaaagcaaccatatgagtttaaaaataaagcaaattagggttatttactaaagggacaagagacttttcaaagatttaattgtgtcttgaaggcattgtgcatcgaagatgccagaaatattgattctgagtccatcaggattataaccacaatatatttagaaagacaaaggcatgtgggatttattctaggaatgaattaatttccagaaaaattaaagtacaaacaacttggcattatgtacagaatctttaacaacaataataacaaacgcatacaaaaaggagtggcttagttggtagagtacttgcctagcatgtataaggccctgggttcaatggataaaccacataaattgactatgatgatacatgcctgtaatcctggcactccatatgtggcagagaaggacccaaagttcaaggtcatccttgggtatccagtgaattttaaaccagcttaggttatatgaagccaaccctatctcaaaaataatacttaaaaatcaaactatcatagttgaacacctagttagtgtatagtgttcaaaagcttaataccatcgtaaaatatgcattattctccctttgaaagcaaaacaagctgttcacagaagacaaattttatggcttgtctgtcaatgacacagagtttaccctcaagatgttttgaagtttccagcttgtctgggagatctttcaattgaactgtttctatgagatttatgatgactgaaattgtattgtagtgacattttagcccaataatccaggttgtagaaaaatatttctttctctttcctgaaagtacaagatgttgcagaagaatgattagagtaggctcttgcatgagtgcacttgtgtgaaggccacctgcttgatgtcatacgatgtaatacatgtaagcatctgacactccacagtctccatccatgcaatttgtgcagtagtaacaactgtgttgtataatttagagaccatcctctgtgtggcctactgattagcaaaatgaaatcacagtaacatcaattaatattgctttggtgtgtgtgaatatacaagtacatgttccttcaagaaaacgtattcatcaaagagagatcaatacttccagcttttgaggggctggtagtctaattgaggagaaaggcaaaccaacaccataaatgaattgcctgggctaatttaaagggagtcatgcacatgagacaaagaatcaaatatagtttggtgttttttcttgttttgttttgtttattgcccaagaagactccaagacaagtgtcttcccatcttgcaaagtaacatgtggtagctaaatatggcagctcttccagggcatatgtgctgttgcctgcttcaaatataatttcttggaatggttcacacatatggatgaagtcacagcttctattaaaatctcctaaagtccttctcccattatcagatttttgctatttgattgtagagagcagaatttcaggataccattggttgtagctcatagagagtaacatgacacaaatgtgatggaccattacagtctggcccaaggcacatttgagcacagccctgacatggcaggcggtgaactgctatataatgtgatctttaggtggaagactgtgaagcactggctgagggtctatcattggttctcacccatgggtcatgatccctttagcaaactctgtctcaaaaaaatttacattatgattcataacaagagcaacataaattacaaaatagcaacaaaaataattttatggttgaagtcatgacaacatggggaactgtatttaagggttgcagcgttagaaagactgagaaagactgcaattggagaaactggatgaatggctaccccgggcccctgattggatcattacaatattcatctactttggctttccacattactcagcattctacattttgggatatttccttttgtgttaaattttgggttgactcaagtcacaaaccagtacaatgggctccatgttcaggagagcagaatcatagaattgctggttggatggggagtagccctccacatctgagctatagctgcctccatgtgccacttaaaataaaataccttaattagaggttaacacaatgtggaatgtcagcaaggccatgttatcacaaagccactaaaacccacaattggaagaaaaaatagtaaaaatacaaacttcagctccacttggacaaatttactcagcgttcataatatggattccttagctttagggaggtgttttctttcccttttaaaccttcaacagagcctgagattgatgttgcttacattgatgatgtttgtgcaaagcatttttctctgattaaaataggacagaaaatgtgaacgttatgaaaaagtaatgaaaacatgtagcaatccaatattccactttggaatcataaggaggaattccagccttgaggctggagagacggatcagcgggtaagacacttgctgctttttcagaggacccgggttcagttcccagcacccacttggcagttcacaaccatctatataattccagttccagagattctatgccttcttttggcctctaagggtgccagacatatatgtggtacatagacgtgcatgcagacagaatagttacacatagaaaataaaaataaataaataaataagtagataaataagatatagccttagagaccctgaaacaaaatttaaaaaataaatttacctttgaaaccatgttatgtttcacttccacatattaaaaactgggtaagaacaaagtgtccacttgcaaggaggaagggactcacattttgaaaaaagttaaaaataaactgaatttcattaagtgcatgaaaaaaatctaatttatattttctgtctgatttttcttagctacagctggggcttgttagtagtaatttatagacactttctttcctctagaaaatattctgtttcttctttaaaggtcatctcagttactgtgggaactttaccaagtgaaataaacaaatactcactttccctaacaaaccggtgaaccaacaaagacctggtcatgacattgaatacactttccataatctttgagactgtgaaagcaactcagagaaccagtttcgaggaacagtcatgtttagggcccaaggctcaaaattaaagcaagaatattttctaatattcttttgctttgaggatgcatcaaataagctgtttttcttcttagaagtaagctgtgttctcatattcatgatggcttggcttgcattttttttttactatggttatgtaaaccctcttgaattgtagagataaaaatatgtctaaaacataataaagacaaataaaaattctatgtgtagaactcaataatctaggtagtatatttgctgagtagttgtgacatagcacacattagaagtgctctgttaattcttagggagttatagccatgaaatcacagtgctgaggagtggagatggagtagtgaaaacaattcaactagacttggattcagactgtgctgtcattttctgtttttgaagagtattattttaaacattcagagtatttttcttgatttataacaggattttcatttacaggcttatgcaaattagaaataacacatagtaactaacaggggatagttatcaagtaactagaatatgtattaacatcatttatacaggggaattatgattgtgtctgcagaggggctgtaccacagaccaaccaagtgactactccaaggagatactagaaggtagccattcttaatgcccaggcctgcaaactaacaatgaatgctttccaatatttgtatttgatgggattttctgagaaaccaagggctaaaggtctattgttttctaactttttaatacaatccttgactgtaatggaccctcaaatgtttaatgaattcataaatctccatatcaaataaaatagctattttcatgtatacattttttcactctagcttattcatgggcattgggtttcttgtacacatgcctttgatgtagtattttgtttcataattagtttatgtttttaactttaattattaaatgatataaatattacatcattcctccaccatgggccatggcgcccactccctctcttaactcatgacttcattttattgaagtatcattacatatattatacatttgaataaatatataaatacagcatgctaattacattgagtgttgcttctatctgatttcatggctgaccagttggtattaggtaaccaaatgggggcttctccccaggaaataccaattctcactctcctcgaagtcattaattagcttttcatgtaaggttggtgccaactgaagggaattttctgcatgtgtatgtgtgtgatatgcataaatgggtgtatatgtgttcccacatgtggggacatgtgtgtgtgttcagtggacatgtgcatgtgcacatgtggacggtcctcctcgattgttctccactgtatttgctgaagtagtcttctgatgaacgtggagctcaccaattccagcgagtctagctttttccagagatcccctgtctccaccacccaagagatgctattataggcagcatctttacttatctacctggaatttacttgagtcctggggatctgaatccaaatcctcacacttggggttatgctttacccaccgaaccatcttcccctgttcttatgcaaatttaagtacaggaaaatgtcaagctgaaatccagagaatagaagtccaatgaaacacctataaagggctgcagcagtgtggagtgactgagatgcaaggaccttaggctccagtgacctaagttgctatttgtcattattcaaatttaaatcagcattgaggccctctaacaaagaggctgctctgagatagaagcaacagatagagcagttccaggaaagggagagctgtttcctaggaactagaagtttaatcacaggaaaaatcagactttcttcacaagatgaaaaggaactcccacacctcatgtcaacagtagcacactgtgggaccagctgtccaagggagatgtctggtagataagacacacaagtatttctctgaatgttattactcaacttaagagtgggggatttttgtgttgaagggcagtagatgcctgccattcttcaatgcaccacacttccccctacctttagcaccagtcatctaagggacagagtctcttgctgaagacaaggcagcaatctgatgtgttttttttcacactgacctgatacaaggcatgcaaaatctaataaattaaggagctgctacaaggaagtggctgcttagctcagccacaccatttgcaaagcctcttggaagtgcttttccctgtgtacaacattttcagtgtaagtttttagagtaagtttgtttttccatttccattaacctattttagataatccctaacagctttgcccagatcccttggtgattctaaaccccacttgactgtcaatcaagaataactgctgtgcttctctgcccaccagaactagatgattagaccctattgctgaagactccatacattttagttgcaagatgtagagaaataaagctgtgatagagctggaaacttcctccctgctggctagctttcataatggcaggaggtgccaatgaaaaggcagcaatattttatccagttgctaaccctatgacctataataccaagctgtcaagcaagatgtacctagttgtacaatggtggcatgactgttgtagtgatgaccaactactttccgcttagataataggcccattccacagaaggaatggatgtttggtattgtaacctcaaaaaaaaaatatgactgataaagtaataggctctagtggtggtggtggtattagcactgtttagctgaattaaaacaacatgaaagtgccatctaaatatctatatttttatccatatgcaaatgttattctcagcctaactcatttaagactttctgattaaagaaacagtaaatgcagacttctggttgttcaaggtgctaagaataagtggccattgactacctagtcctaaataaaacattcgtatttctccttctatgattcagagaacattgggaaagagagaataaaaagaatacaataccagaaagataagaaacagggtgataaaatggatcttattacattattacattattacaatcatgaactcatagcacctgccctaaccaacagtcagtcatgagtggggaagaggcctatggagtctatacttgtctggtaaatgaaagaatactgatagattctggaagaaggaagccaatgccttcagttgtgtacacactagtgaatccatcaggttccaatacataaatcggaactcatagtcacacagacatccctcattaaactcagtgggtcaaaactatacaaaaagacgtgaatgtgataaaggaattcgtagggaggatggggagaggctgacagattgaaaggtaggtaagagaacatagagggtaagagtaattagcacacattaaatacaagtatcaaattgtcaatccatcataaattcaaccactgaaagatgacagatgattcttgcagggtggactagaaacaaagttgaagtcaagctaaaccttcctccggatattttcagctccaaagtgaatgatttagtttcagcagagtctgaaatctccacccacatctagtgtattagaactcagtgaggtgcagtgcatcttaaaattcgtaagtcaagatttctcaaacacagtatgaaatctcaaaattggaagccaactccaagtaccaaataactactattttcaccacttctattttatatttgagcattttagtctctcttgtctttttcgtccattaatataaaattcctaaaatgggaactaagaatttttaaccacttcctctgtgccaagcacttcccttcctttacttcacttaattctcccaattccatgaaagaggtagttcacaagcaaagcaactgattctccaagggctgcttcaagatgtcatctaccccgtagacgtagaacagagctcagatgcaaaccaataaagaagagtgtaatcatatatcaaaacattggttagcttattataaagcaaacataggagcattgtaaagctgagcagaaaatactaaaatataacaaatgagacaaaattaagactactttcacattccataaatgaacacaacttacattttgaaggtattccgttctagatataagcagagagagagttgcaggttgggggatggatgtatgcatgtgtgcacgtctgtcagtatgaagatagatcctgaggttttttgtttttattttgtagagttatctatttatatgtttatttagagaagactgtagagatacaaaaattcatatcatgaaaatgaaatctttcagcataaaaccaaagggtaaatagaaaagtataaaagacagaaataacttgaacttggcacaaaaaatattctcatgggtattgatgcttcaaatgcatcaagaaaagggctaaattttggtctcttttaaaggatttaaaaatatacaactttaaaatacgtattatttattacaaggataatttttgtcagacaatcataatttaaactatcagtttatgtaatctgtagtatagtttcttgtagttcttcctatctttccacttacaaaatgtgtcctcatatacggtgtctgttgtggacgactcttctattccttgacacctgtaccaactacccatttgccacacgagattgggatttagggagtgtattgaaaatcaattgggaaaaatagcaataattcttgtaggaagtagtaaggtagaaacatagactttaattagcttctggatgcttctgattaactcagacagacaggtatactatctcttttattttaaaaaagtattccttttttgatatataatataattaaaatatttctccattctctttcctccatccaaactctcccatatacccctcttgctctttttcaaattcacatcttctttttcattcactgttgttacatgtgagtgtatgtgtgtgggtttgtgtatgtgtgtgtgtgtgttcctaaatagataagtacaacctgttcagtttgtataatattacttgtatgtatgttttcagtgttagccatttggaactagataaccaattggtgttgaatagcctccttgagaaatagtactagaagtcactatgaaagcttccaaaggagagaagcaaccaacagttctactcatctacgactgcaaaatcacaacaatgatcagcatgacatgttgaccctatgtgaaatagtggtatacataccttagaggtaagcaacagatccctaattggactatctgtgtctaattcatacaccagaaaaaaatatatcattaatatcatcttttaaattgatacaaatttatatccaacatctggaccctcatattctttctatattagctaattcatctcatcttgtttgggttataaagaaattcacctttaaaatagtaaatattaagattctttgaagtaccaggacaacagcactgaaagagaaatttaaattgaacgggtattatatgtgagttttcttaaagttttattgcataaagaaagttaaaaatccacagctgacctacagaagcctagagagagctcaattctcataggtagcatggccttgaaattcagagtttgaaaattgtgcaagttacatataagatcagcaagaggtggatgacttatgagttattgataacattcctgaaaaaattgttttataagacctataactcttttaaattactcttcaaaataaaataaataaatacttttggttggagtacatttggtttctcatattggtcacatttttgtggtttctagaatgcagttgcttttcaaaaactcttactaaagtggcatgatacttgcaataaccaacaactctctaactagacttaagatctgagggaagttatgcctgatagtggaaagctggccaaaacccaagcactggtgatgatctcatggatcttggagaacctacaactgccactttactaaaccagcataattcctaactacatgctgattatctgtccttatacatgcagattgtttactccacaccccacaccaaacaaacttctcttttcaatcgacaaagaccattaacagaaaaccacaaccaatcaaaagggagaattgtgaaaactctgcattttaaattctagcagctcactttacctcggtacccatgaagggcatagaagtcacaggatgtccagaaaaaataaaaagcctcatacatacagctttctgtactttagcttttatctgtgaatgtttgtcttcagtgggacctcatactgtcatggtacctacaaccatcaaggaacagcccctttaattctctatctgtgaatattagaagtgaaagggacctaaaaacttagaaacctaaaacagaatttcagagaagagaatgtaaaataatggatttgcatggcctattatccaaagacacatggttcaacctagtctttggatgctaaaacatttatactagaaaggccttgttgcacctaaatatatcatttatatttattcctatatctgtatgctaaggccataaatatgactagaaagagctaacagagtcaaatacccatttattcttcttttgtttaagtgtacgttctaggcttatttgaaaaaatttaaagactattttttctcttttcatactgaaaataatttttatgcaatgtattttgatgatggcttctcatcccgaaacttcttctagatcctccccacctctccaaccaaccaaccaactcttcccagatcctccccaccatcccaccaactcaaacaactcctcccagatccttcccaactctccacccacccaaccaattcttcccagatcttaggaatgcctaacatcgggactgaaattttataattttttttaattaaaagttttcacatgatatattttgatcatattctttataatgaagttcttgcaattaccaatcaaattattttaattttctttgtgtttttcatatctgggtctgagggaggtattttcaaagtgagcctaaaactgcagagaaattcaagattccaaatatctactttgggtcacagtgcaatgaaaggttttgaagagtttccatggaccaggcatgcacaactcagccactttcccttgatgttggaaggagattttaacatctcctggagagccatataagtactgacatctttacaggaagtccaaacgagtctaacttccacatgtatcagaaagtgagaacactatataatgcactgggcttttcttgggaaataccaggatgcttcacagatagcatctgtccccaaaacactcatatattcagttcctattcagtgctgttagtgaatatgaacatgttttgaagtcctgacctattaattagcctagtctatcagattctgggagctgtttgttagactacatcgtggtaatggatttagctatttctatttaattctgttcagttttactttatgtattgggaaggaagctctggtactagacacataagtatgtatgtgtgtgatatggtctcatccagatgcacttgacatttattctcatgtaatacccaagcagcactccttgcctttagttgcaatcttcatctttagtaaaattctttgtaaagccagtatcatttttattgtgctcctttgatactcctcttccttatgctcattgtttttttattctctgtttcactagagtttcatatttaactcatatatcttattaaatacttgtagttaacacttttatctatttgactatctctgaccattaatgaatacaacattattggcatgtctgaattataaataattaagtcatcaattatactatttgttatttttccatatcattggaatttttccctttatttcttctttcctgaatgttttagtttgacacagcttttaaaaatatccttagtctatttcctgacttaacaatacctctttatgtttctagtgattgcttagcctaccccctccttacactttgaattcaatgtacataaatttccataaatctccacccgatcttttttttctttcattgcacctctctttttttccagtagcagaagcataaaaaatcaccaagacaatttcatttgagctataagaattaaatcataggaacataaatatagccgcatgtaaaaatccccctatggggaggggctatggcatctggtctcacacagaagcagctgcactgagaaaggttgtttaaagaaaatatttttagtttctttggatttccatcttggtttcttgaacggtggcatccgttgtactccataccatatgttgggaatgtttacattttgcttctgaattccaacttaagacaattctaaattatcctagagtccttgagggagaggtagataaaattatacttactgaaaaatacaggaactatatcttccaaagcttgtgggtataattctgatgttcatccatatgccccagcagcaacttgtaacttaaaaggtatttgtactctctgataagatatcaacagatggactatattggccattaaaataattccagtactgaaatacagctgcaaagtcaccttgttagtatgtgtcagtcatgtaagatgatggattccattgcaacactgctgtgcaagcatagggcaaattttggccacatgtgacagtatatggtttaattaatcaaaagtgttgtagacttagagtaatctttgacctatggtgaaactgaatgtcagagagaggacgtatcttacttaacttgtcaagctataatttgaaaccagtactctctgaatcaatggtttgctcctaactgcagatccttcatagctaaggtttttgtcatggggcttttgcagtgtcaattaagacataaggaaagaatgacattttccagggttaaggactttatattttccccatttttcttcatcttctttgttggtagattcttggaatttaactaggtacaatggtaatttgcaaagattacatttcacagactgttttactgtatgtgttccaatgtaaaatgaaaataaaagactcaaagatattggggttcaagaatcgagctgaagatcggagaagcaaagtagccaagctagatgatcttacctctacccagctgaaatagcaattctgtttccacaaatcctcagaggcaaaagctatcagttcctgtctcctccttttattcctttctctgcccagccatatcactcctgtctccacctctctaatgctgattaaaggcttgtgatcccaggtgctgagatcactttgtgtgagctgtttcttttaggactggatccacttcaggtagtcaatgtggccttgaactaacagagatctgtctacctctttttttttgcagatttttttaatttgaattataaacaagattgtattacatgacaatcccagttctctcctcccccccttattcccctaccatcccctcaactaaaacctacctatcacatatcctttctgctccccagggatggtgaagccttctctagggggtcatcagagtatatcgtatcctttgtgatagggcctaggcccacccttgtgtgtcttggctcagggagtattcctctatatggaatgggctcccaaagtccacatctatgctagggataagtgctgaactactacaggaggtcctatagatttccgaggtttccccaatgaaatccatgttcctgggttctggatcagtcccatgctgttatcccagctctcagtctggggagcaagaattccctgacattcaggtcagttggttctgtgggtttcaccagcctggtctggacccctttgctcttcaatcttccttctctgcatctggattccagttcagtaagtgataagttgtgggtgtctgcttctacttccaccagctgctggatgagggctattgggtggcatataagtcagtcatcaatctcattatcaggggagggcatttaaggtagcctctcctctgttgcttatattgttagctggtgtcatctttgtggatctccagacaattccctagtgcctggtttttctgtaaacctaaaatgtctccctatattatggcatctccattcttgttatcttctattcttcccctgactcaaactttctgctccctcatgtcctctgcatcccttctcttctccccttctcattctcctagctccctccccctcttccattgctctcaatttgctcaggggatctttatactttccccttcttcaggggaccatgtatgtctctcttaggctccttcttgttttctagcttctctgacagtgtggattgtaggctggtaattctttactctatgtctaaaatccacatatgagtgagtacatatcatgtttgtctttttgttattgagttaccttgctcagaatggtttcttctagtttcatccattttcctggaaatttcaagattccatttttttttccactgagtagtactccattgtgtaaatgtaccacattttctctatccatcttcggttgaggagcatctaggctgcttccactttctggctattacaaataatgctgctatgaacatcattgaacagatatccttgtatgaatgtgcttcttttgggtatatgcctgagagtggaattgctggacctggtaggagactgattccctttttcttaaggtgttgccataatgatttccaaagtggctgtaccagctggcactccagtcagcagtggagaagtgttccctttctccaaatcctctccagcataaactgtcactggtgtttttgattttggccattccgacaggagtaagatggtatctcagagttgttttgattagcatttccctgatagctaaggatgtagaacactttcttttgtgtctttcagccattttagattcctctattgagaattgtctatttagttcggtaccccactttttaattggattgtttggtgttttggagactagcttcttgagttctttgtatattttggagatcagccctctgtcagatgtggagttggtgaatatctttttccagtctgtgggctgctgttttgtcttgctgactgtgtcctttgccttacagaagcttctcagtttcaggaggtgccatttatcaattgttgatctcagtgtctgtgctactggtgtaatgttcaggaagcagtctcctgtacctattaattcaagggtatttcccactttgtcttctaatagggttagtgtggctgggtttatgttgaggtttttgatccatttaacttaagttttatgcatgacgataggcttgggtctatctgtagtcttcgacatgtccacatccagttatgccagcaccatttgttgaagatgttctctttattgcatcatataaatttggattgtttgtcaaaaatcgggtgttcgtaggtgtgtaggttaataccatggttttcaactgtattccgttgctctacctgtctatttttgtgccaataccaagctgttttcaggactctggctctgtaatagagcttgaagtcaggatgatgatgcttctggaagttcctttattgtacagggttgttttggctatcctgggtcttttgttctccatataaagttgagaattgttctttcaaggtctgtgaagacttgtgttgggattttgatggggattgcattgaatctgtagattgcttttggcaagatttccatttttactatgttaatcctccctatccaagagcgtggtatatctttccattttctggtatctttttaattcctttgtttagagagtcaacattcttaccatacaggtctttcacatttttggttagtgttaccccaaggtattttgtgttgtttgtggcaattgtaaagagtgatgtttctctgatttttttctccaccaatgtgtcatcggtatatagtagggctacagatttttttttagtgaatcttgtatcctgccactttgctgaaggtgtttatcagctgtaggacttccctggttgagtttttcgggtcactcatgtagactatccatatcatctgcacatagtgagagtttgacttcttcctttctgatttgtattcccttgatctccttttgctgtcatattgctttagctagaacttcaaggacaatattgaagaggtacggagagagtggtcagccttgtcttgtccctgattttagaggaattgcattgagtttctctccatttaatttgatattggctgtgggcttgctgtatattgcttttattatgttaaggtatgttctgatttctccaagacctttatcatgaaggggtattggattttgtcaaaggcttttttggcatctagtcagatgatcatattttttttcctcaaaagtttctgagcatggccacggaactgcaaccagaaatagcccctggcctacctgggctggtggatggaggcggaactgttacaggggccttggcagtgtctgggtgtgtttgatctcactcaagatctgtctacctcttaatcctgagtcctagaattaaaagtgtgtgccaccactgcctggtttctatggctaatgagtatggctgctttgctatttgatctccagtggctttaacaaatcataaacaatatatcaccacattccaatgcagttaaattcaacccagtaagatcctgtagagattttgagagcatttctgagaagttcccatgaagaacaagaattacctccattttcttccttccacattatactttacttattagaatgcaaaatttaaagtctgaaatgccaacagttatattttcattggaggatggccctttatctcagggagggtagggtggaaggttggaaagagttggacagcttcaaggaaacacaatacaacccaccaaattactaattccatgcctttttcacacacaaaggacaaacttctatccattttagccagtttatgagctacttcaaatctactcctaataaattctctttctaaaaagcttcatgacttaaggcttgacatgtgtaatctaggtatccattttacaaccatgcaaataaaaacaacacattacagatgacaaaacagccagatgtgaaatacttagatcttaaaggctattattgaggcactaaaaaccccgtacttttggaattcattatgagagataagacaaatcgtcccccccctttaaaaaaatactatatagttagggcatgtaatttgtacagaagttgagtctcaagaacatgtaactacatgtagaataaaatccaagcttcttatccacatctacttaagtttatggcatggcttcctattcttcctcctgtcgagtgctacttgcccactcgattcaatctaaagccattggtgctgccttgctatgtatctctgggttttagtatttctgtgagtccatggatggacagtgccttagtccatttgagttcctataataaaaccctctggacttcataatttataaagactaggaatgtattaatcacaattctagggctggcagatggatacctgctgtgtagtaatttagtgcagaaagtcgtgaaggtctagctagtttccctcaagccaatttataaggcacagatcccattaataaagacacagcctacatggcctaatctaaacctgtgtcttcacaatgttaccttgaggataaagtctcaaaatgaagttctaagagcatagaaaaatcaaataatggtaaataatacttccctgaagtgaatatattgctacatgttttctttactggctacaccatcttcactatactctttcttagcacagaaacctttaaagtcggaaaaagcctaaattgttattaaaaattattcatatcattttttactatccattacacttccttctctcctccatcccctcagtttccctttccttgttaaaagtagacactgttgcatacattactaaccactggactttaacaaactaattttagaattagaaatgagctgcttttttatttagatgtacttattttacttgacatgtataattatttgtctgcatgcatgtacttatacctttgtaccaacaaaggccagaagaggcattaaatctcttggaaatggagttatgatgattgtgagctcccatttgtgtgctggcaactgaaacaaagttctttgcaagagtaacaagttctcttaccttctgagccaactttccagctccgagagcagttttaaatgttcctcaggtatctaaattgaggtcatcttcttggctattggccctcagagctattgcatctatggagaaggctgactagttagatgctgttgtgtttatactgtgtttcagttggtcttgaatgtcatcatgaaattactttattgattttggaagctgtaatagatattcttggtaatgaacatgactacatctgtaattaactaaaacacaagtggctgaatacacgtgtgagggacttttttattaattaaatcatttgaagttgaaagatccactttcaatctggatcttttgtagtggaaagatccacctttaacctgggccacaccttctactggcagccaatataaaggacatggaggaaggaaggaagcttgctgtccatttttgcctccctccccccctctctctactttttcttgctctcaccatcacaacgtccattccttttactggcattagagcctacttctttgggattctgatgtatactgaatatcagctgagacatccagccttgtgaactgaacagctactggattcttgatccttcatttggtagacagccattgttgaactacctggacaacagcctgtaagccattctaataaattccttgcataagttctattcctctagagaagcctgactaatacagaatgtggtaatacattgtttatgatctaataaagcactgaagatcatgtaaagccagccatattagttagtcatagaacctgggcagtggtggcccacacttttcattccaggatttaggatacagaggcagatggatctctgtgagtccaagaccaccctggactacacaaaagttaatcagtctaaaacattaacagagttcatgcctataatcccagaactagagagttatataaagaagaagcaaagggtctcatgagagatggagtttctggtcagggaagacaggatctccatttcagccttggtagaggtaagagctagtggctggctgcttctctgatcttcagcttgaaccccaatatctgggtttttattattcatgttacaaaagaagccatgacacaaactttacatgttttatatatatataaatatatatatacatatatacatatatacatatatacatatatatatatatatattatatcttagttgttactaagaaagcattccattaacctctgtggctaaacactgtcagtttaagggagagttgcctatgttcctcagcatctttaggtatctgaccccaatgttctaaactcttaatatcagaggtgtttttctatttcttgactttgtcattttctacctacacattactagaactatgattccagacatttgtgcatataagagagttaacattgttattagttataggtattgtatagtgtaaattccttcagaaatatgaatctgtaagaaagaaataattaataaatagctcattctaactggaataccagaatacaaagggctgtattcaatcagcaaaactacctctagttctagaatgaacatgtttatgggatggtcagcaaagaaagaaagtggagaaaaaaagcaatagattactttgtataaaaatgtagaaacaattttatgtttggaaagcctgagtatatggagtgtggtgctgggtgatgcaggaaatgaaagcagataaaacaagaaggagccaaaagaaaggcacagcaatgagccaaagttttcctagagcagcagcctagatgaaatcattgataggatggagagtgataggcaatgccctttcaatccctaaccagcagcaaaacttaaggaaagccatgtgatacttcactcatggaagaaatagtgatgctctccaatgggagaaactgattcaaaaaatggcatgcatgcatggcacatactaaactttcataatgtgaaaaatgatggtcaggatcttttggggtagcaacttgacctactatgtttgtggtgtgaaaggaaagaatctgttactcccaaatgattttaaataaacaataaacttaaataacagactatttcccctacaggaagatccatgcattcatcttaccgggtacctgttttcacttctgaatctgtcagaagaaattttaaatacattttccatatgtttaaaatcaatgaaaagaataaactatatcttttgaacatcctcagcaaaatgcagcttttagattatgtatattctctttcttattgaaatttgaaaatgaatttggcaaaattatttcctggtgtacaagtgaactattagaatccatgtcttctatctgaagtgtagtactgagggaggaagggagggagggagggaggggggagggagggagggaggaggggagaagaaggagagtaccaatatgccataatcaataagactgggatgtttccagacgcactggattggagtacaaaagataaatgagaacctcattagctaaaggaaacaagtcttaattttaaaattaataaaaatttttatcactcattacctactggactaaataatattaggggatcgcttatgagtcttaatatcagccactcaccgttttcttatttttatttccattttccagttaaacactttgcatgtaagctctatagataacaggcactgtgtaatttaggaaacagaaatggatgtttaatgttccattaaattagaaactgaagctatgtgatttgcgctatgccaaccagaaataatagaagccagagagattataggcacatttacttagtgatgaaagatttgctcatgtttccaagaggaaacatcaatgtctatcatctggatatgtgttgaatgttgaactagaactctgtaactgcctgtgacttcatatatcagcattacaatgggattgctctaggatgatagttgcagtgtcaagtcccaggtagcgacaggaacttatgctaaggctgttgaggggcaatagggtggaaatcaagagagcatgtgtctgtagttttggaatattcaatccagtgctttgagatttgtctcaaatatttacggaaggtctttcatttaaattgaagctctcatacctgagtataacagtattgcctcatttccactctcttcatcctccattccttccatgtcccttctataattctttctctttttctcctggggaacaagcattcacccatacagacctatgggggccattcacattgaaactatcacaaatatggtaataacacagattctgagctaagtttacagtgctaagtataagttttctctagctgattggaatttaggtccaattaaacagctgttgattactccaagatgcatgtgtcactatcaccacactggaggcattttgccagtcctgtcattgagattttaaggctttctagctaggtaaggatgttgatcaattttctcttggcagtttacaatgcaccctctgatactataagagctatctctcagggaggaagcttccatgtcaggacctgttcaattcctctacttcctgtgactgaagggtgtggtatctccaaaaatagtgtcttaccctcatgttctgaaggcaatcaaaaagaaagagtgacctgggccctgctcctgcctctgatggagctccactgttctggtgcagtccccacaagcaaaaggcaggtgagagaattgcctccaagctatgcccccagccccactacacactgtactgatgggcatgtccttctgtatatacgtttctcttattggttgataaataaaacactgtttggccaatagccaatagtggcaggaagataggcaggactaggagaagaggagaattctgggatgagtaggcagagagagactgcaggaggaaaccttgtagggagtgggagaatagaacatgtcagtcattctccggtaaaataaggccacatagaaatacatagatttagagaaaagggttaataattaagacagagctggccaataagaagccctcgccattggccaatagtttaataattaatgtagcatctctgagtgtttatttggggttgaagggcatgaccagcatgacctggtggaacaagaaatcttcagggatactgtccctccaagaaccactctgttacccaacctaacacaactgaacattgtccccatggcaagcacctccccaaaatcccagcacactatataggcacaggtgcaaaccacagcagttggaaaaaacaggtgaataacacacttcccaaagtctagaccctaactaaactccagggtatactctgtgctcctcaccctcccatcccagcactagcaaggcagttgggccctgcccccacctctggtggaactccattgctctggtgcagtccccaccagccagcaagcaggcacctgaacacccaccctctctgtggccagccctcttctgcaagtctagcagactacataggcacaggttcaaaccacactacttggcaaaatagatgagtaaacactggggtaataatgcattcaacaactaaaagaacaatatggcactaactagaacccagtgatcctacagcagcaagacctgaacattccaatgcagctgaaacacaaaaacagacatatcaaaattatactagacatttcactggagactctaaaagccagaaggtcctggacagatgttccatagatactaaaggtccatggatgccatcccagaatagaaatactttacccagcaaaactttcaatcaccatagatggagaaaactagatattttctaacaaaaccagatttaaataatacctatctataaatcagcactacagaaagtactacaaggaaaactccaatccaaggaactcatctacactcacaaatgcacaggcaatagataatctcacaacagcaaaacaaaaagaggggaaaatatacactactactaccatcacctcaaacaccattcattaatagtaggagacttcaatacaccactctcaccattggacttgtctgccagacaaaaacttaacaagaaacaactaactaacatgttatgactcaaattgacttaatagatgtctgtagaacatttcacccaaacacaaaagaatatgtcctcttcttggtacttcatgaaactgtcactaaaattgaccacatgaaattaaggacttcctagaaatcattgaaaacgaacccacaatgtagccaaacttaagggacacaatgaaatctgtgttaagaggaaaggtcatagcacagtaggacaaaagcaacaaaatctaaaagaaatggacaacttacttgatagataccacataccaaaattaaatcaagaccagataaacaatttaaatagacctataatgcccaaggaaatagaagcagtcattaaaatctcaaccaaaaacaaaacaaaaacaaatagaaaacccagggccagagggtttttagcacaaaattctatcagaattgcaaaaaagagctgatatcaatactccccaaattgttccccacaatagaaacagaaagaatattgccaaattctttattaaaattatcctgatgcccaaaccaaacaaagatgcaacaaagaaagaattatagaccaatcatcctcataaacattgatgcaaaaataataaaatacgggccagcataattgaagaacgcatcaaaaaaagcatccaccgtgatcaagtaagcttcatcccagagatgcagggatagttcaacatatgaacatttggcagtgtaatccaccatataaacaaattgaaggaaaagaaaatgaatgatcatctcattagatgctgaaaaaaaaaaaactatggcaaatccaacacccctttatgataaaagtcatggagagatcaggatacaaggaacatacctaaacataataatgacaaatacatcaagccaacctcaaattaaatggagagaaacttaaagtaattccattaaaaccagggataatacaaagttgtccactccctcaatatctactcaatacagcattaaggcaaaaaaaaaaaaaaaggagacaagggaatacaaattggaaaagaaaaagtcaaacttttactatttgcagatgatgtgatagtatacataagtgaccgcaaaaattctacaaggaactcctacagcagataggcatcttcagtattgtggctgaatacgagattaactcaaaaacaaaacagaacggaacagaagccctcctatatacagatgataaataggctgagaaagaaatcagagaaagaacaccctttacaatagccataaataatatacaatatcttggggtaagtctaattaaataaatgaaagacctatatgacaagaattttatgtctttaaagaaagaaattgtgagatcagaaaatcgaaagatctcccatgctcatgcatcagttggaacatagtaaaaatggcaatcttaccaaatgcaatctacaaattcaatgcaatctccaacaaagtcccaaaacaattcttcaaagattaaaaaagaacaatatttgacttcatattgaaaaagaaaaaaaaactgtaagtttcatgatttcatttttctttactagtgtgtataagtatatatatatatatatatatatatatatatatatatatatatatatcacattttcattatgcacttgtcaattgatggatatctaggctgcttacatttcctagctattatgaacagagtgaccttgaacatgattgagcaggtatctctgtagagagatatcaagtcatttggacatatacaaggagtggtatagctgggtcacatggcagatctatttttagatttttgaggtttctcctcactaattcctatttatggaatatctctaagctgtgtgtctttacacagattcctaaattccctaagctttagcttctttattggacagatgaacaaacttaaaagttaatctaaggagttagtattgtagaatagaaactaattagcacagattctctgtactaaccacatagaactcaattattactagtgtatttcttgtttataaggtcttctctggcttcattactgccacaccaaatccagtagacaagttccacagacagaggcgataacttcaaaagaaagaaggtctcctggaaatggttgtggaattctcagccagagaaaaatattgggctgtgaaactcatggcaatttctgtttgttcttctattccttttttttcacattaacagcatgttcctaaaaacctatactgacattttaaacaaaataaatagataagaaaacatcccctaagatctcagcttaggaaaaaccagcgctttccaaatcattcatgtcattcacgtaagtacaaatagtaaaaactttcccaacagtaaaatttcctatggttgtacatttgtcaccgaacgtgggcttaagtgtcagataacaaaagctttttataagaaagaatttaaatagttaaaatagcccaattcttcaaaaactcactagaactaggtaatagatgttaagcaataactgaccataaaaatatattaatttgatttaagaaatatgtggttagccttgcatgatcctatattaatcaaggacagtcctatgttttgattaatcaaggacaattttgtgttttgattaaccctggatgattctgtgttttggatctctttgtcactatgccaagtaacaataatgtcatatgtttgagtttgtttaagaaaaatatcccatgagaaatatctctatataaaacctcgtttgagaaatacaaaatacagattcaaactgcctctgtgtttgtttctgtttgtcatcaaatccttactcacctattcttcgaggaccctcattccagggactctcataaccagctggggtggtctgtggcacattactacataacacactttataaccggctccagtgtaaatgacagcctgtctgaaactactatattccatgtcctcttttgtcttaggaaacaataacaatagcaaaaacctcaaaacatatgtgtaatattttataatttgtcaacataagaagccttaaaaatcaaagtgttggcatgactacattccttcagaagtgtctggaatgaatctatttcctggtgttttcgaacctctagagactactggcgttggctcatgcttctacatccttttacctctacctgtgtcatcagctctggctctgactatctcacccctcttataaggattttcagaagtgcactggctctacatagaaaacccaggataacattcccctctcaaatatctcagcttagtcaatcaggaaacattatttttcttatcatgtaaagcagtgtagttactggctccagacactagtgcatagatggctttgagggttaagtcatgcaacttaccacatccatattttagggtcatgtgacactggcgacttacatctgttacgtgctgctttcctggctgcatgtttacattcctggtatttgggccctgtggcttacactttaactctccctcctgttgaatgactgtctgggttatcaaatagttatgtggagtaaccagcaccaaggcttttctttgcatatgaacttgaatcagggacattttcattaacaccacagacctgacgctatccaccaaaatgcttctaaatcaacccacttgccataactgtccttatttttgtatctatcctccattatttaaaatcacagaggcaataaaacttcttattgcttctcttatgcctgcatctataaccttactctatataaccttacttttctacttgctcagagcctcctggcttttccagtcaccaagtgtctctcaagaacccaagctccatgatgccctgtgctacgaaatccagttactgcaacagtaagctatgtgatccatcctatggcatgcctttgccatcctgctgagcttgccaagagctactgggaaaagttgtgcacctaggcagacccagtcactatttatttaattctcttctcctttgaaatgtctcaaacatatcataactctcctcaaaactccaatgctagccaatgatcctcattctcagaaggtgactccattgctttccgaaaaacttttaatacatctcaccctacagcaaagctgcatccattgccaacaccactttccttcctgcacaatcagaagattatattctcttctcctcttcctagacaaaacgtctctggtattatcatgtcaccaatgtctctcatcactgtattttctctgtcctaggttttcagtatcatccccattgttggtagatatttttgtcgtcttgttccttagacaaaactctactctttaaaactttcccccacacatttctgttacatcagactctggtgtgcatgtttgtttgcttgttctgttagctcttctgatgttactgacatagtttcctggattgtcatcttttgttatgagcatcacattactggttgtgcctcaaactgtgcaaatgagttacaaatcagtgccttcagctctcccttggttggaggtcctagtaagaaagttccttctaaactcctgtggtcagatgttccatgaacacactggggctcagcacatctaatttgatgtctttctccctgttcattttctctcttcttaattaattctctattttctctaacctagacaatggcacactccttttacttaaggtagaaacttaagtgatatattaaacactctgatatactttatttcctctttccaattaaaactaatcacaagttttcactaattttatgatgaatgtgtgtaggtatgccatctctgaatttcacttctaaaccaccacttatctgccacagcctcttaattatcacactttgctaatactttgatctcctctacttcattactatgatgtaggaccacatgcctaagacacaaatcttccttgcaattatagatttcaaaggttttccttatcacaacttctcaaagactctccaccacttcagaaatgttgagctctctgtcatgtccttcaaatatttttaatgttatgatcatttcctacctgattcttctcagccacctcttgtcttgcagtaaataaattacttgtgatcctaaaacaacattccatttcttgttttctgtctttctttatttcttctgactaaagtcctcttgatcttttaccattactcctcaataatatcagtattaccaggcattgtggcaaacgctatataatctcagttttaaagaaggaaaaacagaagattaccacaagttcaaggccaaccccacctgtgcaatgagtgccaaactaccccaaaatacagagagattctgcttcaatagaataaaaatatcaacatataagtgaatgaattccatacctctctttctattagctattaaacaaattgttaccaacctacaatccatagatgcagagaggtttgatataagaaaaagactggggggcatatggatcttccttggagtgagaatagattttatgggtggaccagggctgggtagggactagaataggagcatcacatggggaagcagacaggagatactgttgagtgaggcaatgcagggagagatagctggaggtcaaggtaattggagggatgatatggatatatatatatatatatatatatatatatatatatatatatatggatgagatctcctaaaaataggcaatatggagtcccaactgaacattgctcatttccatatcatccctcaaatgctactcaatttcaggtgtctctccctgtattctctccttcatttgacttgaggtccagccatacctgacactgcttgaatgaccaagaaccagagactagatatctcagagatctaggataaaaccaaacaccactggtctaaaaaattatcaataagatggcttctaatgatattctgctgtattcatataatagtaccttattcagtcatcatcagagaagcttcctcctgcaacagatgggaacagatacagagaccagagacccagggccagacattttacacacacacacacacacacacacacacacacagagagagagagagagagagagagagagagagagagagagagagaggtatacttgggacacacagctctaaatggaatgcctatatcaaatcccttccctcagagctcaaggaaccctgcagaagaggaggtgcaaagagtataagagctagagataatgggggacaccaggagaacaaggtcttctgaatcaactgagcaaagttcatatgaactcaagcataatgaagcagtaagcatagaacctatgtgagtttgaaccagaccctctgatatatatatatatatatatatatatatatatatatatatgatgcaaaagcaatgagtcttttattgcagttgtttaacaagctaaccccattagcttgatagtgaatgtgactgatgaaatctgccatctattaataaattaagagtttgctggttctcctaggtaatgctaagctacaggtacattgtgaacatgggcctgatttgactcaaccccgtgtagtagatgaaacttgttctctgctattatatagaatataatatatagaagcttgttctatgctattataatcaccacgtcctcagagctagaaggtattaatgtgacctaaaatgaataaagtagctgtgatgacaacatgccaccaatcccagattatgagaggaagggacagaagaaatatgagctataaactggcatgagttacataatgagatcctgacacagaaagaaaacaaaataaacaatcaaagatatactatgcctgggtgggctttttatacacatgatttacccatatgtgtctcatactcatgatcataggaccatttacattggtaaagccatttggatacatttgggggaatatatttgggttattttcttatttgttttaacttttattttgtttttggaagaaatgagcattgttccccttgccatagttgcatttaacaatttcttgaatctgcaatggtatatataaaagaaagaaatatttagtataatttataaaataaattttgaacttttaatctttttaatctaaactacatcaatatgtgcatactttataatactctcccaggatgctagacaatggaagaaacttcagctctcaaatagacatgaaaccagaatggaaaatcagctatattctacagtagaatgggctgttgagccgtgatttccagtattttgtgtatattaaagcatttttaacttattgtggacttagcaattacaagacccctctatgttagaagcatctacacattaatactttctgtgaaacctagcacttcatatgtgtctataagattttcatttttgtttcagtttagaaacacagagctgatatataattagatatgttcaattctctgcatgactactatctaataaaaatagaatagaaccacatatttaactttaaattttctgctaactacattagaaaataaagctagaggtaacaatcaattttaataacatattttatctaacccagaagatccacaatattatttttctagtacttgttcaatatttctagaaattatattctttgtaaatattgtctttaaaatccaatgtagtgtttacctgtctcaatttgaattaaccacatactgaatgctcagtagtcatatatatatccaatgcctatcatatgaaacagctctatattcttatatttattttatggctttttaatcaatattaattcttacagaaacataattatctcagtaaatttgtggacttttggaaagttttcataacctcttttcccttctgcttaataatatattttgtagctgtatgttacaaaatgaattaaagtttagtttataaaaattatgtttgaggattttttgtttgtatgtttgtttgtttgttgtttgttttatagtactggtatcaagcccaggaccttatgcatggtagttaagcacactaccaactaagccacattcccagacatgaaaaattatgctatgaatttctcagagttttcctgatctctgacagcctcatttgcatggaagtgcagtatcacaatgaataggacacatttccacttggagaaactgctcatgtttcagtgggtctattttaccaacacttatgtcagccctatgcacagtagtatagaaagggctattataagtctgtggaaagccttgctccgtctaagagagcaaatgatggacacaagatcaagtcttggactcctattttctaagtaaagattttgttttctagtgcagagaatttggaacatttctccattggctgatggtaactttcttttgtgtaacctctccctgtttggaggttgttcagttcctacaattgacaatgtcctccttagtgcatggtctaatctctttgactttacttgagctgcttactcaagtgtgaagtgagtatttaggataaaagttgactcagacacagcccagcatgctctttgttgtaaataactaagcctctagggctccttgctgttttgtgtgttattgactctcattctgtggacagccttgtttatatcccataccctcattgcttgatttcagaaactcagtattttgccaattttatcaaataagtattaaaataaaagaaataaataactcaccccaaattgatatggtggaaaggcaacatattcaaatttctcagccagggcttttgtttttacctactaaattctagaggatctagatggagtggcatcttgcttaaaatgcaaagcagaagaaatagttctttgaccctagaccagcacaaaggacagaaatcaaaacctcagtgatctcctagaacttttccttcagaagatagaggctcattttaagtgaggttagaaatctaagcaagatgaaagaaagaaaaacaagcatctaaattgggacatctcaaatttccagaaatatgcatgatgacaatttgctcagaacataaaatcgcaaacagcgtatgtggggttgaaattttagcacccaaaacatttgtccattttaaaatgcagcaatttcaatgacatctaaaggactgagtgctcaaacatgaattgacaagttgctttgatcttgctaaatgttttcagtatgactcaaatgctttcatttgcacaactgactgaattagagggatcttggttatgtttctgaagtatttggtcaatgccaaactaagtatgccactgaagaaaaaataaaaaccagtgtaaagattgtcttcaattccaatggatttgtgttgtcttaaactcaacatatattgaaaatataactcaaaaatacttctaatactcttaacagctgcacactagagtttattctcttgatcacagcagcagctcactctctataccataaaagtcatagaacagaacatatcactagttcatgaaaagaatcaaagtttaaaatttgaagtgtgatctccattcaatgtatgtcaccttcacactttacagagttaaaattcctcagtagaactgtcttagcctattttaatcaccatatcagcagatgtaattgtgactcattaatatatcactgatttcttcctctttggagccagggttgtagttgagcatcactgagatattcacaaccgccctctaacattcctgaaaaagcaacttgtgactgagaaagtggccaacatcatccttcagttacaaccagtaggagaggcctctgtgccccagcatcctccttgcctctatctcccagcatcctcctctttagccttagttaaagcagtctagggaaaagttctacccatgaattttgtccatctaccacctgttcgctgcctatgcctgacttcatcttcatgacttccccattttttcactttgggtattactctcaaattctgcctcattaactgctgctttgaatattcacttggtatttatgaccattctctccactcctaccacagtgcacaaaactggttccattgacttcataaccaacactagagaagacactgataacatggacccaactctagttcaattcagaaaagaccagccagagccaccactctccagaaacttccatgtgcaggatgatcctcttcatgctgacacactttctaaaaaaatccccatcttctgacatagcccactcagagtcacccatgaaaccacaaaggacttagagcaaagagtggcaatctgcagcctggttcagtcctcaatagctgaaggttattgatactatagagtttctaatttttagtcttttatatcaagttgagttgcagtagaagtgaaaacacagatcgagtcttaacacaagctaactctggagctctggctgtagctcgcacagagcacttccgttgtgctagagatattcgtgcctttccaccagtgtacagctgtcctcttcagacataaagaccactgcatgaacatcttgtgtccataacaatcaagatgcatgttctacttgagttgacagatggattgaaaaacaacaacatcaaaaccagaaccaaaatatatccttctgggtttcctttgagatggctcagcggttaagggcactgaatgatcttccagatgacctaggttcaaatcccagtgcccacatgcaattcaactccaagatctgacactctcatccagacatacctgcagacaaaacaccaatgcatatacaatttaaaaataaattgagaaagattacttgcagatgccactgccgatcctgcagccacctctctgctccttgttctccaaccgtgccaagcacaagccagagcaagagagcagctttccctccagcttatcacttgtcacctgacagacaagaccatgccctagtgcttgctatcctaaggctattggcaggttgagttcccacaacactttcttagtttaatttatttgattaacatttgtcaaatattgcatatcagacctggtagcagtagctgggagtatatggtttttgttcttaagaatctagacttgacagagtaggctaacaagcgggagggcatattcttactcagccagcatagatcagtctttggggtttatgggagttaagagtaagtcttgacaggctccagcagggcagctgaaactaccccgtcagtccacagtctttacacatttgtcactgatggatgtaaatatttatggctcacatgacaaatgacttgccttatttggtgacttgaggctctgtgcaagtgcagggtcactagggtggtgttaagtttccattgagatcctggctggattaaggcctgggagtcctggcagctgaaaatgtaagtgtgtcctaacccatcccccctcataatcctctttctctcacacatgtccacaaaccactcccccaccgtcaggggaaagaaattaagaaaatctgtacgtggagttgtggggagaaaaatctatccgatgactgggattctgcataatgttgagtgtagagaagacctacacgaagctcattgtcatgacaaaatccgaaggtacagtctcactcagctgctgaacagcacggtgctatggcaggttgtcctggaggagcttgattcagcatgctctcccaggtgtggaccctgagatcaggcagtggggagcatctgggctctcctgggagtgcacaagtcagtaagaaagctcagtccaagccaggccttttaggggatttgaagtttctttctttcttttcttttctttttttctttctaaaactggaccttcacactctagcattcacattttggtgcttggacaaagggacaatccctttcttctctgtcatgatcggtatcttcagggaatccccaggaaactctatatgaaatgactcatccttaagaggcagaaggtttaacaggttgtggtagttgtgaagtattagttcagactggttgtcaagttggcaggttctgaaatcacttaggggacagacctctgtccatgtgtagattgagttgaggtgggaaggctatctataaccatgggctggagttgttcttggaccgaacaagatggagaaagtactttctcactacagctgtacagtcaccacttgcttcagctgccatgccttctccatcaggatagcagataacaccttaacctctaagccaaaattaacccttcattccttaaactgcttttcccaggtacttttgttaaaagaaaagtcactaatgcaattagagaatccattgtgcaaaccctgtatcttgaagataaataagtaaaacaaagtacataaaaatactaaaagcttacttgttgagtgatgcatgatagaattgttcatataatattctagtcaatttgcttcacaattgcttatcttatttgatagattaccttctttttgggtgtgactgaaatatgattacatttaggaatagctaaattctagctgtgtaacaaacacatcatcacataattgttgtcttaagataaagagaacttacattccaatgtctatacttgcgatggagcaatatgttgctactaattataactaccctgctgtacaataaatcttttgaaataaaataaaagaatctagacttgaaaaaatagaatggagtaggtaaaacaataaggtttaaaaatagcaaactgaattcatgtggactctaactcctctataatttaaaattctggacccctgtgaaactgttctggatagactaaggcaggaggcaggggactatagccagagatgagtgaaataacatttgaacaggacaactgagagaagtgtggcaagttgttgtagtaaaagtagttttaaaaatgattatgataaaatgtgtgtaacaaaatatgttgtttaaaccacctttggtgtacaattcagagatattattatacaaagtgctattcagccatcaccatttaataatttctgaagttttcattatcaccaatagaaattctgtactcatcaaataatagttccctgtttctttccatgcaaagccctctgtagtctccaaactgttttgtgtatctgtgactttgctccttgcagatactttgtgtaggtggaaccacacaacactagacctttgcaaatggctctttcacccggcataatattttaaacatttatgtgtgctgtgacagctgatagcagaacttcatttctctatgtgtcaaaataaatgccatcaagcatctgtgtacaaatacttacctgagtttcaagttttgggtttatgggtagaattgctcaaattactagtgagcctatggtaggcttttaaaataacgtttatgtgttttattttcattaaatttatttgtttagtgagatggtagcctgtgccaatacacacactggcctactgagtcatgtaacctggccatgggttggacatgttgaggaatcctcaaagcatcattcacagaagcagccctagtttatattcctgtcattagtgacaactcctccttttcttttgttctatgcttatcctcagtaggtttgttgtcctatatttaccctcagtggattgcttaatgcctgtctatttgtgaaaggacatagttctttactcactaccaattcaaatgctaattcttcctacaagcccctgtctagcacatacataccagggatccaacttctgtcttgattagactgggtcttttcatggcatttcctcactcttctctttttgaattggaatattcccatgtacccttgcatactgatttatgtaacttgggatttttagcctccaggtgcttacagataaacattaccttgagtctcaggagactatgagcataaatgttaaagaatactagaactgtagagaaattgaagacgggagatggacctaaaacattgtatgttataagatagacattagcctttggaggctagagggaaaatgttcatgtcttcagagcttggccccaagagggtagtctaattaggatgtatttagatcacaaggatgataacttcaccaatgaattaacacctggatgagctcaaagctaaatatgctgttattaggtgcatattggttagagaaagcaggtcactgttgagaacacctctgaaggacatgtggtctcaagacatttcatcttttgctagtcctgcttcctagctaccatgtggtgaacaaatttttcatcatgtcctttttttctttgctatttttcctttgtctgtgttctaagaaatgagaccagtcaactttgatttgaaatctctaaaactgtgagccaaaattcaatcttttattccttttttggatttgttatttccgtgtgtgtgtgtggggggttatgtgtcccatctatgtacagtcatagaggaggccagatagtatcagatcccctggaactagagtaacatccagttgtgagccacctaatgtcggttctggggacgttcaaatccaggtcctctgaagagcattaaatactcttaaacactgagtcatctctccatgcctgatccttcacttttaaattttttaaaaattgattttaatagaaatagaattatattactctaaccctgcctttcatccctccagcccctaccaggtactctccctccacaaataaatacaatctacagagtgcgttttgtggttggttttcttgaatattttgccatagcaatgaaaagctagcacatgctacttttctgatttataccagttttcactgttgacttatttttggatggatgcaccaaaaataaaaaaataaaaaaacccaaacacctcaaaatggaataagcataacgctacttatcatggtagaagaaaaaggaaagatggttagaggatctaatcctaatataacagaaaatggcaataaagtatttgaaactggaaagtatttaaataatttcaggcacaatggaacagttatgatgaaaaccaacattgggctcattatttttgaactgatagaatgtaaagataaagcaactatgtttcagccatcaagttttaaggtaatattcacaagagaataattagaattaccattacctgatcagaattacaaaggctggcaactaatgaaatgtcttcaaaatgtggaatgaaaatattgtaaaactagaattcactgcttaacagaaacattgtttaataccagaaataaaagaatgattttattctaccataccaataagtcactaaatgctaacgaccaaacagtgattattgaagcaatgtcaaaaattcaggcactgattttatgctgtctttaaatatgaaatacactttaaatatgaacttgaattcattgaaatttctaaaaagatggaaaacttctataccatagaaacataaaaaataaggggtacataacataaaaattgaaagactgtaatggaaagggacaattataaatcaggcaaatttcaaaaatgtgtttggtaaagcagggagacaaagcaccagtaaagaaacagatggcttaaacagcactgtcaacttcttctatccaatggttatagaacactagacccatcatctgtgtaacaatttataatcatctcagaatgcggggtgcattcaccacattgtgctctggacagcaaactaggcttgctttttatcaaatgcctagatgagtaactttcttcaagtagtcttctctctaaaagacaagtataagttgagcattacctgcttctacctggttttcaaaagaaggcatatttgtctctttcctattactatagttaaggcaaatgtaaggaatggaaggttattgcattaacactattgggggattcaaaagcacggtgcaggagcaccctggctctagccatcagatggtattacagttgcaggaggttttagaagagggggtaattgtattgctgtagttgatcagttatttttgtatggctgtgactacaatatatgaaaaaacacctgaaaaacaggaaaagaattttctcagttttctgaagtttagttcatggctgcctatccccacatccttggacaggtcttcatgacaataagagttaatggcaggaaaaattcttctcttcatcatagacagaaaccacggtagagacaggaagagtctatggatcaggtttaatctgcaagagaagtgtccaataagccttcttccaagatactctcctcttaatgtttctacaccttccaaaactgtgttaccagctggcaacaagggtctcatacatgaatagtgggaacagtttgtattcaaatcataggaaacagaaatctaaactaagatagatgtcacacaagaacaagatagttggaaatttctaaggtgcacccctagtgatgcacacatctcccactaggtcccaacatttataggtcccaccaaatatatcaacacggaggaccattcttccaacatataaactcattcaaaacatacccaaactatttcagaaggtaggctcacttttctcaggcatatcagattgtggtggaattgttcttacacaaaggtggaagcatagcatgtcaccccaaatgctctgctcagttcacaggagctttgttgaaagctacatgcagtattgtggaaaattgttgatgctgttgttgttgaaccctcatgaccaaactgcacagaatgtcaaattaagaataaagtatatgataaattttatatagctatgtttatcttttcgagcaaacgaacatgggtgtgagtactactctgatattcattggctttaggatcctcagtgagtgattgtatggctgtttttcatgtgtaaaataaggatcataataacaattttgtaagattgttgtaaaattaaatttaatcatgcatgcaaaatggcatgattttgttcaattcgttaaaaaaatacctttaaataaaaaatgtatgttatgcagaggtgagatgcctagtactgcacagaggcatttggtgacgactgctgtcagtgcttagagaggcaaattattttaccaggcacactgcataaaaaagtaaagactttctgacagtgagattagttagtagaactagcctggagagaaaatgtagtgcaataacatgcctaatactgatttctaaaattgtatcctaataaaaattaacttacacacagacacagctaattctagaatcccatcattttaaccatgtgtcagataggcctttcaattatgcagaacttttaattttggtttttaattttaaaggtagttgtcatagtaacttccaggcgttgctggcaaatggtactaaagagatatgcaaacattttcatggagtttttcaatatgttgataaaaaattatacaatatttaacagaaatgctacaagtcatagcaaaggagaatcctcatggaaaactaaaattgtgctaggccaaaggctgtaactggggaggatacatacccttgggaacggtgggtaagaaagcattgcaaccaaacatttctggaaatgttaatgaattgttagaattaaacaatcacaaatccataaataataaaatggaagcaacaatgtgatgctaggaacacgttcttctgtgttgtgttgtcagatcagagtgtgcctagctactaccatctggtgactataacactgagttccttgtgttttataacaaaacatttgccctggggaaaggttgaagccctagggtctggggctgaggccaggtgaaacagactggaagaagctgttcaaaagccaactccagactatttccaaaagtgagcaagatttcagacatttgttggttaaacccagatagacaagaagggtgtggtgggatgtgagacagtgaaatttctcctaatcacttctgtgctaatgaaacagcatgcctacaagtggggccatgaatgctaggaagtccgggatcatggtcctgcaattgggtggtgtctttcctggtctatcctcacattgcagaaggcagaagatcaagaaagagagacacttactgtccaaggccttttctctgcagcatcattcccttcataaaggtggagccattaggacctaaacagcttcccaaatgtccctttccaataatattgcattgaggattaattcaatcacatgagcttgtggagacctaccaagaatacaacaaagtcattaacttctcagaaaccttagctacttggaaattattgatgcctaagtcataatatgctcttcatgacttcccaaaggtgaaagttgatgccatccttgtcccatttcttatagcatttcaagaagttgaaatttcacagctactttctaaaaacaatacaccgttttgggtctactgtacctctgacaccagtacacattatgtatagcttcaatatgaatgatgtatggatttaatatattactaaacaagatgatttccataatgtggggaagaagtattttcttaaaaccgagctactatcatatgatttgttcacgatccattgttatgtaacaagtcacctcaaatttctcagctgagcccatagataaatattcctctcagccttaaatcagaaacacaccccccccctttccagcaaatggtggtgaatgcagagactcattttctgcccaggttggtgagttaatgatagaaaagtgcttgcccctagccatgttgtttacatcattcttattgtgaaagacaaggtgggaaaaatgtgaccctcagaaaatgaggagaagatgctgtgaaatgtcactcactgaacagaaaacagccattgtagtcatgaactcatagctgctgatgcctgctcttggtatgcacaaaactggacccaccaacagtcaggtaaagatggaggaagagcaccgggaacgtgacctcttactgctgaactagtgacactgaatgattcatagaaaagggaatcggtgagttcaactgcgtactctttgaggaccctatcaaacaccaatggacagttccagtccaactgttgcatatactgctctgattaaactaaatggctcacaagaacatttgctttaatgatgcaaaggtgtgttgcattcttttatgttgcattcctttaactttatatagggggcagtacatccccaaaattcctagcaaacgttcttttgtagagaagcaaaaacttcaattttcactggaattactggacagcagcaaaacagcactgtgtttatcctgtagcttttctgtgtctgtgtctgattgagaagaacagacagaaacaggcatcttggtgagcagagagcaagcgagcacatcagagaaatgcattttcctgtcatggcaaatggttgcaccaggctgaaatcaccttcccaaatcagcagatcaatgatggtagggacaaggcaccactgccagctttctagatcacaggtgtggactgcaaatgtcaagttagctgagagtgttctaaaataacctggaattgatgcagcagaacagacaaaatggcaaagcacagaagatgcttagggtgctgaaaaatagtatatatcacaacagtgagagcacaccattacacatttgtcctaatttatggaacccacaacacccagagggaaagatgataaactaccctgatggggaatgtggggactggtggaggctatgcatggttaaggtagagatcatgccagacatctctgtaccttccctgggctttctatgaacctaatacagctccagcaaacaaaccatttaatgtagtaactgtcaggagagagtaactgtaatgaaaatcccttagcctaagcttgtttctaaaactccagcctggcatcattagtttatgtatcttaattttttaattttttattcttctttcatacattaaatgcagacttaagtttcctatctctctactcctcacagcgcccaccaccacccagatccacttctcctccattcccttaaaaaaatgagcaggcctcccaggaatatcaactgaacagggcatagaaagttacaataagactaggcacaaaccctcaagtctggacaaggcaacccaatggaggaaaggggcccaagtgtgggcaagagtcacagacaccccagactcacattgttaggggttccacaagaacacccagctatacaaccataatgtatatgtagagggcctaggtcagacacatgcagggtccatgacttttgcttcaatctctgttagcacctatgagctgtgcttagttgatttttgtgagctgtgtaatcgattattttaaaggtagcacactctgttacagaaaactccagattttgaagagaccaaaggaaaaccagtcaatatattaattttgaattttaaccctttgcctatctgtctccaaacctctgctctggccttttacctcacgactcacttccacaaactgatgcctcagattcccttatgttcccaacctcatgtgcctgatgcaaaaggacttctttgaaaatccaccctctcagctccatctctagtagaacactaagaagcacctacagaaagaaaggtggcaatgatagtgtatccctcctcttctagtcctagcacagccgctggtctggcagataggagctattttgcaattgatgaaaatgccatacagataaatctgtgtaatttacataaaatgttcctctcaaagactttatggaatccataattgtttaaccttttatttattatctgtggatttcccattatgtatcccaatcccactcatctccccatcccctcgaatctgccctctgcccttgcaacctccctcccaaaacaaagcaaaccagaatctggaaatttggatgctaaaacttgtatctgagaatgaaacaacaaggtagacactaagaggggagaggagaaggtctttgtagtatagcttgtgaccagaatttagatcagtattaatattgtctgtttcgctgcaatgtagttgttggtgatcatgctcacacagacagcacccacgtatttaaaaccacattataagagatagcaaccaaatatgacaaaataaaatattcttctctaatgagagacagaaaaggagtggattcagtggagggaggtagggaagagctgggatgtaatgtaaataggatatttttgtatgaaaaaataatctattttcaataaaaagtaaaataaggattcatttaaaaactgtgttataaagatacttatttcactgggtaggaagatgctaggtgctaaagaaatattaacttttggtgataatatgttttttctttaaataattcaaatgatgttttggagaccataaagatatactatcatttcaggtaaaatctacattgttttgatgacatttaactagaataaacctaattaatctaaaaattctgggataagtaggtataactggcaaaatgtattgaatttgacttctgctataaattaaccaatcactaataagcagcctctcagaaagaaaccttcccacatgcatgagactcatgatcccagcaagttttcaatttaggttttttgaaaatgtcttattggggtatgagggtgtccaaatgcatgttttatttctcatgtatgaaattatcaaagaatggatttgattaagaaacaaattgttatattttgttttatttctcatttgaacaaagacaggaagaccctgtctcgtgatcttttattccactcatgaagacccagattcttcccatcccagaaggaatgaaaatttaagaactttctgcaggctaaagggaataatgaacacatagatgctgatgaatgaggatatcacagagagagaaagggaagagtgcttacacagggttgagaaaggaaccctatccacttctaatagcatccttgaagtggttagtaccctgctgggaagctgtatctggaacaagatggctcagacaatagtatccataacctataaaaccaaaaaaacaatgttctggattatgcagtgcactgaaggatccaggtcatcttgcctcaaaaaaaaaaaaaaaaaaaaatcattgacttctgctctacccagaccgatccagtaagatgtattgctatctgtgataccaagggtacattggaagtaactgcaatagatagatgatgagaatccaaaccctccctctcccctgattactgtgtgagggaactagggagatcataccattcaagtagttcacaggttttctgatttttctttttttaaattttgttgttgttgatttatttttcatcagtttaaggaaggtgacacattttcaaaaatatagacattagttctgatgccaaactgttgtatcaaaggttgctttagttttatttgtaaactaaaataaatgtaattgcattgaagcacacttttgtatagcatttagtactatttattaagaatacaaccatggttactcctgcattcttttacctatagtgtagcattttctgcagtcaccaagtaaatttgtatattctacctaaaaaataatcatgtttcctaattcagtttttacattttatctcataaatattattgaaatgtctgtcaatacccactagtcaaccaacaccaggaacacaatcatggttaaacaagtcagattttttgtttgttgtcatgagaagggatggctacttgttgagctatggggcatctgaaggacaggatgctggagataatgtactgcatagttaagtgacatgtgagatgatttgacaagtatccaaaggggtagggctttacttggtattgaattctgtcaagaagtggtaatttttattatttattacaattaatctcatccataagaaagaaagattagaaaaaggtaaatattgtaattggtttaaaaatgaaaatctgtcactcattaggcaagatacaggaatacttggacacactcatggtttgggtgacatatacatttttcctatagtcatacatgattatagagtagtcatactttaccttgatttgttttgttcacagttcatagtaactaacctgtcactaatgttttttttaatagtccacatttagcaaaacaacaaagccttcatgactggcaaacactttaagaaatggggtaaaactgcttcaacactgtcacctttccctatatgctgcacttaatatggaatatgaataagagtctctctgtgaaagacctcaaacataaactacattctggagaaaaaaaagtgctgcccaagtggcttccaggtgtcactggctgctgattgtcaaatatgcctgaaaagcccttcccagagcccaatatgatataactatttctcctgacaatgtccaccaatatgttttagtataacatttgccaattatttttaaaccaacttataaactttcatatctttaaagaatttgcaaatccattatttaaacaggactttatcttatatgaaatagattgacataaagcaataaggaaaaatgacatttgatcatgttatatttaaacaaggagtgtggggaagatcccgaacattctaacactgttgtaagtaggcaccgtatctaaagggcatactagctgggcaaaggtttcaatttaatattacatcaatatgaacaaacactgatgccatgtttaaatagtcccagaattcaattcaaagtatcatacatgtgaaagacatctctttgcattgtgctgtatatgcaaccttcacaggtcacatggtgttttaattgtataacataacagcattgttggaaatatgaaaagatttcatgtaattgaccttcaaatagaaaagcactaataaaatccacacatggtatttgcttatagatataaatgactacatacatgatacatgcaaagacatatccatcatggctatgtattgctgagtaatatttaaatccctccattccttcctatgtaaatgaggctgagaatagtaataccaaactgacatttgtaaggcataagacagtagtcgcaagcatacacatattgcttatttgcacagatgagctctgggaaaaaataagctgatagcaatatttaacttgatggatggtaaagtaataaagggtgaggaatggagagatgaaagggattgcttgctatttggggcaaactttacagaggtatttacatggcttcattatggccatcaacctttcttctatctttttgcctgacctccttttcagtccttaacaatttctactgctttcaggacacgctttgtcttgtgtttgtcttgttttagttcccatatatgtggtggttgatttcaatgtcaacttgatacaaattagaatcacttgagtagggaacctcaactgaggaatttttctgaacaccttcatcagtgtgaaaaacctaccccaaatgtggttggcaccttctgatagcagtaactacctagctcttggcctctatagtaagagacaggtactatgggttattctgatggcagaggcacctaacctcagaaaccaaccaaatatcaaattctctgcctctcaggtgtgaggcaactcttgttgttttgatataagctgatttaacaaacgtgtgtgtgtgtgtgtgtgtgtgtgtgtgtgtgtgtgtgtgtgtgtgtgtgtgtaaatattcatcctattggttctgttactctaaagaacttggctaatacaatatatgaaagaaaatgtgatactgtttgaattatttgctttttgtcaaatttctatacagccttttaaaatgttcactaaactaagtaaaaataggtaagttctgcttttggtgtttcttcttaaccttgattgactgtctcatggcatatcattctctccacccatggtctatgagcatactcatagaacctcagttaggccaggaacttaacttatcacgagcatcaaacgttgtgaattccctccttcatattttagcatttctaagcctaatgtgtcagctaattagggcactacgccaacttactctggagcttcagttgggaagttgtattcaaattttacatgaatatttcagtgagaatttcctagaaattgcattcattttgtttttttttcttctggcccatacattagtgtctcaaagagtgaagatttcaggacattagctgagtgaccagaatcatttggttccctgaaaatcttagcaaattacctgataaagtcatttaaaactgtctcacatctaaaatgttcaggaaagaaagataaattcacttatgtctggataagctgtaaagaaactgttctgccagaaacatgtgaggaaatggcagagccagcagttgcaaaaaaaaaaaaaaatgcttgcatgataaagagtcagacaatacaaaagggacaaattgtgagtaaatgaccaactataggggttcccaacatgacaccgaagtatctgatcctgatcagagagtgtgattgtttgagaaattgtttgggttagtgtgctgtagcagagaataaaagtaattgagaacaatagtgccaatcaacatacacactttctttgcatttttatttgtgaataattcatgcatttaatgcatattgaccaaccccagccaccattctttcctctctagttcttcacctattgtcctactgcttttagctcccaactttgtgtgttcttttcttgaaaacacactgagttcacttattgttgtacatgaatataagatggtctaatagaactgggtagcctctcagaggctgcatccctagggaaaatggattcatcatatatatataatatatatatatatatatatatatatatatatatgatgtgtgtgtgtgtgagtgtgtgtgtgtgtatgtatatgtcgatatacacacacatttataagttgaaaaaggggtaatgaatttgaagaaaatcaaggaggagtatatggtagtgttatttatgttaaacatatacatacatattcctaagtacacaagcataacatgtttatcctacataatattatttacatgtgtgcctgcatgatattatactatgtaatggggaaactgaggttctggggagttaaataagttttctaaatttatacatgtagtagatgctctctgtcttgaacacagatagcatgattctagaacatatgaccctataccccaagcttaaactggtgatgggcttgggaacaacatcacctcatctcagaatttctccttaaaagatttatatcaagtttcagagagtgcagagggcaggtagctttcagcatcagtctattgggactggagtatctgtagtgaacggcccatctcatttttaatagctccctcccttgctactgtgacaaaccacccagcaacttaaggagagaagaactgactttcttctttcatccagatgtaatctactctttgttttctggcacatgaaataatgctaacatttacggtaagtctttgtacctcaattgatacaatgtaggaattcctcacagctaggaccagaacagttgtgttctagaccatattaggtcttgtcaagttgcctataagtagtaatcaccacacacctattttaagcaaatccaccccagtgaattacttaaagtcagggtagaaaatatcagccatttcttcacccaaacaggaaaattccaataaaaacttgtagctttacagcattatttgcagcctgattttagtccattctcttcatgtatctaactggagttgctcccaacaccctctacattcacaccaaggacttgaatctctgtatcaaatttctatatgctaaccataaactaaaacaccacctctacctctacttccagtattaggcaggtaatacattatttagtttattaaagcttgcctgaggattcagaaagcaaagtcaaccacaaaccatagaagccgggcacaagggactcaggatttaatgccaggactcaggattaagaggtagacagatatctgttagttcaaggccacactgacttcttccagaaattgatccagtcctaaagagccacaactcacacaaagatgatctcttgggatcacatggctttattcccaggacttatgaaaggtgtttaagacaggaacaatgtctcagagctagcattcattcttcagccacactgaggataggaagccattcagtctcaggattcttcagccatgttgggagcttagcagtgtgagatttcagtctgaggtttggtggagccaggatcgccttacagtcggaggtagagttctgttcctggcacgtaatagaccactcacaactgtctatctctagagggtctgacatcttctcctggctcctgtggacacctgcatatacatgtgcacactggcccatgtgcgcgcgcgcgcgcacacacacacacacacacacacacacacacacacacacacacacacacacacacacacgaaatgtgcatttaactacatggcaactgaagtatgagcaaataggttgaacagcataggcccagaatgccagtttttgcttctgtgagggaaatccaagaaacattccccatgcttggatctgtttttacagaaaaataggacaatatatttaggttgctaacagaagtgtggaatgtacttctatcagacggttctatgagatgtcattcatcaattgttctctttctgtgggttctacctttgtgaattcaatcaaccacgggctggaaatattccttaaacaatataatacaaatactgcttagaggatttctgatgtattgattgttacatgtggttgggggatgcttaggtatatgcagaggatgcttgtgggttatatacaaataacacagcatctatagaaagaactcaagcatctacagattttgttatgtgtggtagggtcctggtaccaataccttgatggtactttggggaatgactacattggttacttagtttccatttttgcaggaacagagagccacagcttagtaccccttgtatgtttaggaaagaggtgtttgggtttttttttttcataaaggtttaagattttaatctcaattttggaaagtcattaaacatttctaagcttatttagagagagagagagagagagagagagagagagagagagagagagagagagagagagagagagactcttttctagggcctagtctcatggagagttagaaactgtaaagtttatgagttctccccaaagggaaattttaccatgaaaagcacaaaatgcaaaatgcagttatgagaatacagagagggtacaaaggtagtcaccaatcaggttaaaatgagagcagcaagccgcaacattttataacatgggatgaaatgttcaaagactatatacctaatgtattccatgtaaaaaatgagaaacctattaaattgacaaaaaaatagagaaaaaaattttaaatcttacattttaataagagaactcagactatacaaccataccaattataaaatgaaaaataaaaacctatatttatatatactgttatatccagtactcaaataaccataataaacaattttaaattagcaaatatgtttaaaaaataaactttgtcataggtcataagacataatttttgtacattgataaaggtagcaatttgacaatatttactttatacatatgtcttctgtgacttaatactttaattttatgtatttttcataattaagtaaatcaaaatatgttgcaaaaaattactatgtgaacttacagtagaaaaaatatcttaaaaataacaccataagccaggcagtggtggtgcacacctttaatcccagcactcgggaggcaaaggcaggcagatatctgtgagttcaagagcaacctggcctaaaagagctagttccaggacaggctccaaagccacagaaaaactctgtcttgaaaaaccaaaaaaattaaatgcaacaaaaaaataacaccatgagataaataaatggttaagtaaaatgaaatacttcacttaattaaatgcactgctgccccccaaaacaaaattcatgaggtgactttagcacaatagaaaatccaaccattttaaataaacaaatgttacatacagaaagggctgaaaataaacagaaaaattattatttgttgtattagaactatgtacatttttctttctgcccaaatgccatgcttctacctttctacaataaatcatgttattaatattagaataaagatagttaatttttaatcctccatccattattacactaaaatcactaaaaaaaaaacttaaaaaaaatctatgcctagcataaagttggaatggtatatgctccttttccataagctattatgttttccttttactttagtctatattcagcaagaaatcattactgagattgaggcaactgcccgtcatctggttgctgccttcagtgatggagagagctctgtctgtagctgggctgtgatgggcaaggtcaggaaaccagatcaaaatcaagggttagtccctacataaacttttcatctaactttattttctgacaacaaactccacccctaagatgaaggataagacctaaagttatcattcaccactacactaccactctgcgctaacacattgtaaattcactacttcattatcattgtaatattgatttcattaccacttgctacataaagaaaaaaacgaggcaaaaaataaagttaaatagggtttttaaggtacagggtagcaaatctgacacatgagctaaatttactgacaccaaataatttattcttaatctccatctgaatataagcttaaaggaaattataatagttgctacctgctaagtttttattgtggcaggcattgaacatgagaagcatcaagtcttagccaactctttatgaggatgcttgcttgaataaggatattagctgtttttaataaacatcatattttttactgtgtgtgtgtgtgtgtgtgtgtgtgtgtgtgtgtgtgtgtgtgtgttttgcatggatgccattgcacacatgtgaacagatgacaacttgtagaaattagttctctccttctaccatatattgtcctgttggtggcagatattacccactgagctatttggtcaaccatgttttataaaaattctttcaattaatctttccaattccccaccttgagattctctttttcttcttctatagttggtggttgataaatattgcaggaacaaaaccaaaaccaaatatctgaatgataatacacaccaggtttgcaattcacagtctgctgtgggactcttgagtaatccccttgtgtcctttgaggattcacacatctacctagaaattctagtcatgccaaaaagaggaaaatgtcctgaatatctcatgcagagtataagagccatgcctcaatgtttgcatagcctactagactgaaccactcgtatgaattcacaccaatgtgagtagcactggataggaaaaaaaagctgccaaacaaaaaccctgagaatcagatcatttaaattattctgggtggaaaacaacaataactgcttattataataagcaatagagtccccatcatcaccaggatcatctgaaatgtgtgtgcctgtgagcttcaacctgaaaccactcagcttctcggataatgagctagacagaaatggattatgtcagaatgttattccacaaacgttcattttcaaactaactccaggtctctgccaagactctaattgtatgtctctcctctctatatccaaattcagactgtagttcaggaaattacacttccgaactacccatcccatatcataagaagggtatatataacactctcccaactggtacaagccttgtagaacttctgtgttgatgacagatacttcctcacactcacataaggcttagttatatagtttgctttgacaatggactgtaagtagttgtgacatatgccacagctaagaaagactttttaaagtgatatcaagtttaaacacatcctctcgggtgtcctttcctagaagaacatattgtctcaaataggcacttcttcctcccactggacttgaaataaaaacatgtgaaagcaaggctatagttgactcacaactagcataaaacatatgagaaaggagcttttatgactagaaattactgaggtgtgggactcattaatcaacacagaaaattacttctcattttgttacagcacatatctctttcttgggcatttcagctaatatttgagccttggggtgtacccttgacaatgtaaagtactaattttatttgctaacccataaagatgttctctgggatgatgatatcatctgagtttgattattccttatcaaacctgaaatcctgttgattacttcttaattaaataactttctgtgtgtaattgtttgattaaattctcagagttttatcatgagttactatattaagtttgtaatttcttaggagttgagaatcgattgatgcctcctctccctcatttacatattttctgccattctcatttggaaagctctgttctaaggatgtgatccacaatcaatcttcctttgtaattattaaaccatgaaaatgatcagcctatactcatttttgaaaggtaactagctaattttggtctaatcaattctgcatatgcctaatgtagctcttaattttatgaattggcaagaggagaccagaagacatactatcactgactattaattttcaaaagcatcatctgagataaaaactagagagtcttgggagagtctataaaaacagctttctacaatcttttcctattgcataaagaaaattggcattgatgaaatgtagaatgaacttagaggagatatacaacatgcaggcacggcctactggaatttccatagaataagctgtagaaaactggacatcaacaactagaagaggtaagtgacagcttaaacctctagtttaacagcagagaaaattaaaaaaaaaaaactttacaaagaagagcaggagaaagtacagccagcttttcagggatggatgtagtctgtagaacactcccttgacactgaaggggagtgactgtaactcattcaagaagagaacctcaaaaaattgacattgtactctaagtaatgagcaccttaaacagaaccagaagagaggaagagggatagaagttcaacacagcattagcaggacggggaatgcttcctgttaagtacttgactggagaaagctgagatgctattataagagtcccgcttgatggcttggtgactcagatcatctgtgaactatactctctggaaacccagaacaactatcaagaactcatatcctgaggtgttaataccccaccaacccccttcccttcatagttattcctcctttacttactgtattcataatggggaaatccttagatagtggatgattttgcacacagttttgtactttcagggggcacactgtatgataaacatcatgctaccagaaaacaatggcacttacccctactacaacttaatcccttgtaaaaatttaaatacttatactaaaagaatgagtgacttttaaaagtcaaaaaagaaacaattaaaatgagtcattcaatagtttaagagcagatgtgtacataaaagaacatgaaatatcaaggcagcaagactctccaaaaattctaatctcttagtaatggcttgccatgaaaatgaattagataaaatcaaagaaggcaaaagaaagattgtacatgtccgaaagaaagaaagaaaaccaaagagaatacagattaacacctaatgaattccaagagaatagaagcagcttaatgaaataagaaagtcaatgtagtagatgaaagtatgactcacattctaattaaaaacactaaaaatacaagacaaagacagtcttgtattgaaagccaaaagagacaaactcaatccacacacaaaggcaggtcctcaaaataattgaagatttctcaacaggaaccaagatggcttggaatatactgtatttcagtttctaaaagataactaatgagatccagaagatcagggagtttgctgtgagattgtgtctcccagcaacatcagaaactgcacccataaagtctcaccaacatgatcacacaaacatgagctgaacaaggatgacaccaatgggcaagcctcagtggatggagaaaagcccacaagacttcaaccctacaagaggactacaggcaacctgggaaagctgagaaatggaaaggtgacttttcccagggaagagcacatcagctggttgtccaatgccaaacagtcggccttaaaaaatatacattcaagtaacattatatggactgaacagatattattcaggtatgcatttatatgcatatatgcatgcaagaacaatttgtaaaaaaaaaaaaaagagcccatgcatttgaaggagagcagggaggggtatatgggaaggttgggagggaggagagagaagggacagaacatgattacataataatttcaaaactacaattttgaaaagtgaggaaataaaagataactgccaaccaaaggaccatacgcacaaaagcctatgtgtttctataagactccaaagtaaacaagctcaacttatttggaactgaagcatccacaagaaggtgaggtgaggttgccatttcaagacatggtgatgctataacctggtgggtgactaaattagccctctgttaagtagaatgcatacaacagaaaagagttcaggaaaagagacaagagatgcagaagcacaaagcaaggaaacatgcagaggaggcttctgggacatggaggccattattctccctggaattaagacggaataagagacagacatctggatatatggacttgggttgtagagagaatcagcaatatatgtgtagagcatattgctaaatgtttttattttatttttagttaaattagaagtaatcattttacatatcaatcccagttccttctccctcccatgcccctcactgaccccccccatcccattccctttctggttcccaggaagggtgaggccttccatggggcatcatcaaagtctttcacaatatttggccctaccatgtgtgtctaggctgagagagtatccatctatgtggaatgggctcccaaagtccattcacacactagggataaatactgatcctctaccagaggccccatagatcgcccaggtctcctaactgacactcatgttcagggggcttggttcagtcctatgcttgtttcccagctatcagtctggggtccaggagctcccctttgttcagatcagctgtttctgtggttttccccatcctggtcttgacccctttgctcatcactccaccctgcctgcaactggattccaggagttctactcagtgcttagctgtggatctctgtttctgcttccatcagctactggatggaaatctaggatggcatgtaaggtagtcatcaatctcattatggggtaagggtatttaaggtagcctctccactattgcttatattcttagttgggggtcatccttgtagatctctggacagatttctctttgaacctacaatggctccctccattatggtatctcttttcttgctctcctctattcatccccaactcaatcttcctgcttcctcattcctcctccctcttccttttctccctttctctttctcctatttccctcttccctactcccatgttcccaatttgctcaagagatcttgtctctttccccttctccagggaatcgtgtatgtctcttttagggtcctccttgtttcctagcttctctggtggtgtggattatagattggtaatcctttgatatatgtctaatatccatatatgagtgagtacataccatgtttgtctttttgtgactgggttaactcactcaggatggtttcttctagttcaatccatttgccttcgaatttcaagattctatgcccccccccccggctgagtagtactccattgtgtaaatgtaccacattttctttatccattcttcagttgggtgagcatctaggttgcttccaggttctgcctattacaaaaaaatgctgctatgaacatatttgaacagatgttcatgtgttatgaatgtgcatcctttgggtacatgcctaagagtggaattgctggatcttgaggtagactgattcccattttcctgaggaactgccatactgatttccaaagtggctgtacaagtttacactcccactagcaatggaggagtgttcccctttatccacatcctctccagcataaactgtcattagtgtttttttattttagccattctgttaggagcaagatggtatctcagagttgttttgatttgcaaatcttaactccatcctttggtaagaaaaaatccatcactgtgttttaatcagaggagaaaatataccatattttcttttcaacataattcagatctcagggactgaatatttggctcaatgataaaattgtttgtccagtatgttcacagctctgggcttacacatacacacacacacacacacacacacacacacacacacacacacacacgagagagagagagagagagagagagagagagagagagagagagagagagagaatattaactaggattattacagtgaccaggtgatagaattatatgttaatcttgtcacataataactatgactggaacttgggtaccaacaataggtaggagaattgtgagttgattttgcatatccccccatattaaatttgggcacacattcatgttcaatgaatcaatacattaatacacagaattcacatcacataaaaagactgaaatgccagagtgcttaggaggttgagcagagggcaatggctgtggaggcctcagagggctggagtgtgcagtgtccagctttgtgctatgccaccatagcagtgcaaaggacctgggacaatagtgctaaacttggtgatcaagagaattcattgcaaagctgagaaaaactgaaaaaacttccagggttcagagaagggctgattcaggcaggtgtgtggaaatccaatgaatgagccatgaatttaagattttaatttctgataaaagacacataaaatagatattcttaaacaggtaattgcaaatacaagtatatatagatgaccctggcatccagtttcacgcttcatcacccaaaacaaagctgtctcctcagttccaagtaccagtatggaatgcttgtttatgaaagaagacatgtttactaagtccagagtagttgactctggtcttagaacacagattatggtgacctggagtgttgactggttttattttcaatatggcacaaagctagtgtcatctgaaagtagagaacctcagttgagaaaaaaatgcctccataagatccagctgtatgggcattttcttaattagttattgtgactgagagagctccttatatgtgtgtgagtttagtaacatatttgaaatattaaaagttggcattgttatgggtaaacacttgaaaatgaattagctaaactagcaccatatgtattctattaccattgcttgattaatgggaaatatcgatcatgagggaagagtgtaatttaaaaaataattagaataactatatatttccatttaatggaataaaatctatggaagaattttaaaaatacttttcaaatataatatgcaaagtgcctgtgaagtgagcaataggtatggtataaagttaatataaattcaatgtcttcatatatccgtctgctactgaagctttacaaaaaccaccagctgtaatctgtacttctcaagctttgtgatgtacacttcaagaagctatcacctaaaagatgtgttactaagaatctcttagtcatatccatagatagaaaagtctatattatcatttctatgttaactttatcttgttggattccacatttacaggaagactataaaagcctattctttttcacaagatatccacttcacaagtcaggattcatttaatgggttggagaaatgatgctggaagttaaagtctattttcatttttagctttctccatatgttatgcacttgtacctatgtaggagtaatcactctttgctcaattgtactctgaaaaggtaataagcaaaattcattgcaagaataagaataaagtatcaattactttctttattcactccctaatagtaccatcttgtaatcagaattacagttcccataacacattcagaaactggagagacaaaatgcatctttgaattgatcttgatcatttctgcactattcaccaatcaaagaaaggctcaaaaagatagctgcatttgtggtattgctatttgctagctgtttcagaatagccaattttcatatttgagtttctgatttcttttcagccttaaaaataaaatgatttttataaaagaaataatgcctctgcatcaatatcttcatcaatagcaagctagttctgacatgtaagcttccttcgaattggctactttccatggtactgtaagatactatacaggatgttgggaaagaaaagtcatcaacagtcccacccagctgtgaactctgcatgcaacaatgaccaacacagcaagacatgaaaccatagtggcatatatgttgtggaggtaaccacctgcttttgaaaactagagttgaggtccacttcacaggagagaactcattactattactacaataaatgtggccaagaactcatggctggggagttcagaagccctagggaaaatacactactgttatttttgctaaactgacatggtatcaaaatgccttttaaacatttgtcttcatatcagaagttaagagcatctctcagcctcatgagaaaagttcatttttgcaattgagcagcagtcctcgaccttcctaatgctgcaaccctttaatacagttccccatgttgtggtgatccctcaactataatttttttgttgctacttcatatctataattttctacagttatgaaatgtaatataaatatttgtggtttatgatggttttaggtgacccctgtgaaagagctgttgcaccccaaaggggtctcaacccataggttgagaactgctgtaacagagggacgttaataaaaagattcacaaccagttaaagtgcagagaacaaattactgtgaagtagcatctctatcagtcttggggactgagggcatggtgtatcctcttatactttaaactgttaagttttaatcctcttttagactaaaaggggaattgtaggggaagctgcatcacacctatttaagggctggctacaggtatgcctgaccacgccctcacaagcttgcgagggcgtggtcagggggacgtagggactgcgtttttgctttcagtttctcttttgggcttgcgtacagactgctgccacgccggctggctaggccactctgtaagtaaggcttttccctattaaatacccttatgtttctacctgactccgtattggtaatttcccactataggggaccattgtaatagctgtggtgtcaagactgtaggtagttggggagaactgttacaaaacagtgtcttctggacatgaactcatcaggtggttgtgtctgcctgtacaagataaaaacagtctgagttctagcatagatggtagtcactcatgaagcccatcctcactgaggatctaattggcagttgacagctactgggagacagggtgtcagttttattcagagatgtggttcctattagattgccattgcttcaatgagtggctttacacaaatgaacacacaggaagcactaaatggaccaaatgggttttaaaaaggggaggacacaaagttgggatgggaggactctgggaggagttggaggaaggacaggagtgagtatgatcaaaatatattgtatacatgcatgaaatttccaaaaaaggaatacaaaatttatttttaaaaggaaagagggcctgaatcatatgcagggcatcaagctgtttaagatgataagatttgtaagtacattcaaggacaggaagtttttgttcttttcatgttaaccattcatagaactgtcctttaaagcacctttagaggtgaataaaattctaaagagaaatattggctgcataatttattgtttctatgagatccaaatattttaaggtcatcagcataaagtttcttatataggacactgttagcctttgagctgtctgtcataaaatttgttaaacttaccctgcccttggtttgacctctacaatgactgagtgaaaggtttttctgaacctaagtttcctactcaagatacaacaaggaaatattcaaatgccccaatcatttcaaagcctcagcaaaggttagaccttcatgtgaccaaactattactagtactggatccctggatacattttacctggcatttagactagaatgtgaaaggttttcctattacaaaaagttgaactttctgaaaaaatactgatcagctattttgaaaacaccaattattcttatctccccttgtgaacctttaattggatgtaaatttgtgtttgtggtaacatgtttttataatcaaattttaaaacagagatgcttcagaaattaaaaaaaaaataacagatacccttaacagtttcatgggaacaacagcctggaactaaacaatgttggaaagtttgggcactctaccaccttagtttggaatgacatctgatcatcatctcatctcatttgtgatgcgaaaggctaactaaacatggaagataataagtactgtgattcatgccatccccaggtcaatagaaaggctagtttcttttgattacatcatacagcttctttagattcaagcaagaaaaagaataaataggttacatttcatacagacactcttccattgactatgtgtatttagaatttgagtaaaacttcaaataaagtttgtttattcttatgaaaaagtgttcagagtacatgtattctgtgatgctaatttcagataattccattttcttgcaagtcagttgacagccaaaagacagagatcaatgtcttgtgaatatcatgtcttccagctcaggcatatgttggtgtggagattactatatcttcatgaactgagtcagtttttcaaagaggaacattacctaactcagtaaagaattttaaataagcacataaaaagaaatgacaaaggttcacagttcacagagtgtagtcacaagaattataacccaagcaattaagaaaaaacttcaccatggatgcacatactaagaaaaatatactacataaatatactatgtggcccatcattgcaaagcaagtagcataatacattgacatccttaaggatatctgataaaaatgttaatttccaatttgagtaattgacaccaaacaatattttttgtcaactttctttggacaattcagtggtcttattttttacattgttgacgataaaaacatatgttttagacaaaaccaaatgtttatttccaacattatgggatattttgctttgtttctttgttatttctatgtagcttcaacatattaaggaacacattaaaatggggtcctgaacagtaactagcttttctttcttaaattcattagcagatctatcaggagctaatttctgatggttgtttttctttagagctcattaagattctcctaaaacaaatgggctcatccaggtgagctgtcagctctgtacttacttgtattatctccagttcacaagctgttaacttagttgattcccttaaacaattcatttttcaggaaggaaacagtccatctggttaagggaaacaaataacttcttttggaataaccagagaaacagtagtaatgaataacccaagaattctggatgcaaagagcctccatgtttaatagtgctttgatagagtgcccaattccataaatgtcaacagatgatgacttaatatgacagcatcactaaatggtcccaaacatgtttgtatagaataatatttctgtttaatttaaggaacttcatttggtttttctttttaattttgaacaatgtttaccattatatagtctcattcttatttatttccacattaaataaatttccagtgtttaccttggtaggcttttataacctcacaggagaggactgctccttggaactttaaggatagcaactaataagctatcttgtctttgtctggattatttaaccctctgtgataagcacaaaccagccagttccaaaggaggcagagaatttatcccattcacaaacacataaaaactcagcccttggatagactggaacagcagctatgcattctcttcccctatgcagaagcatctttgtgtttcttttactgtgtgtgccctttgtttttcaataaatttcagctaactgctgagcccttgttttatttgactctttgataaattgaagtcatcattctgatgccattagttggataacagattaaatataaataatagatctttttccttatttgagactataaatggaattttatctcataagtcacttgtgataatatcagttctcaaatatctgtgcaatatacaccttactccacctagagctctagactgggccaacatgcatatctatcagagtaaggtctgctttgggtgggtattcctaatgtttgtgcattaagaaaatgggtgatttctcattgccttgcctaaacctgaaaatcctttgaatagatagaatttttcatttactgtgttttgtttgaaaataaggcaattaaccaaaaaatgttaaatattattgtcattaggtttcaataattatggtatatttcagcaatcaaggtatgtttaatctacctactctaataaaacattttaaaacttggtgtatgtactgatttatccatcttcataatagttcttttagggatagcaaggacatttttcatccttaggaagtctgtcctttttcaggcatatgtgttctcagtgagacaagacaatagacaggatttagttcatttgggattggtttgatttctctttatcagaaattgtagaataggaaaccagtcaattactatagaaaagagtgaaggaaaagctcaggaatcaatttatagccatctatttgcctaaaggttgaacaatggagaaaagcatgaagtatatgcttttacaaaaatgtgaaatgaacaaggaggaaataaaataagttttcttccctgtaaactactaagaaaacttgaaaaaatgaatattaccaaaactctatggtatgaggctctatgcagatatttttccctgttgaaactaaagaaattacataaccatgcagttctcaaaggtgttgccttgaatatctttccttgagttattctcgtacaagttgcctctttgtattatacatttgcttcaatgattttagggagcagttattttaagcatatactaaaaatcccacaaagaatgtgagatgcacaatcttagatctgcaatagactctggtgattgtctgcaatctgtcttgttcaggatcatatgcttgtttctaaatgtaactactcatccctaagaggactggtagagttattagtcagggttgtctagtgtagtgtgtagcaggacttatagaaggaatctctctctatctatatgtacatgtgtgtatgtatacataacacacatacatatagaaagatgatagatagatagatagatagatagatagatagatagatagatagatagatgaaggggatgttttagaatgactgcaggctatggtctaataaatcaacaaggactgcctacaaacagaaactccaagactccagaagctgctcagtccacaaggctggatgtctcagatggtcttcagtagacactggaatcccaaaaaactaggctctaatgccaatgaaggaatggataagcaggaagagcaaaaatttccttcttccatatccttacatgggtttccagcagaatgtgaggcccaaattaaagatgtgtcttcttcttcaagatccagattaaaggcagtcatgagtcttcctacctcaatatccagatttcaagtgtccacattcctacttcaaatgtatagactagatgtagagccacccacttcaaaccaaagaaaaaaaatctcacaggtgtgccctccatttcttgattgtagttcattccggatgtagtcaagctgacctgcattatcacaactagagagaagacagaagtagagctcagtcttagctttttcgtcttaaagcaaagtctaaatcagaagttttacctaaaatgctcactgtgcctagtctactgctcctgcctgcctggtttccctaccctctcatgtgcttccctgagagaacgttcttctcaatgactggtcaaactaccagcttcatgggcttgtgagaaaactgctagtcagtatttcctcagttgaaaccctcccatctgaggggaagctaataatactccaaaagctcaaaaaagcctcagaaagcccctccctaaagttagataaacagcaaggtgctggggagaggagactttctccctaccaaggagtcacccataggtctttcaggaattccagcaatgcttttgtgcatcatgacctgtcccgaatggggcttttaataatgcagctgtttgaataacccaatgtcctgcaaggtaccctgagaaactcagtctgtcaccattttagaatggagtggatcattactttagtctgtctttgtgtcctatctggagtgaatagacattttgtctgtgtctccccaggaaacttcacctgagtaccagagcagagttcaaaagttctgatttcatatctggctcttcttactagctataaaaccttgaaacctaagaggagaagagaagtggggaggagaacagaggaatcaggaagaatgagacaggggagaaatagaggagagtaaggaaggagataccttgatagagggagccagtataggtttatagcaaggtctggcactagggaaatgttcagggaactatagggatgagcccaactaagaatctaggcagtaatggagaggctgcctctgatgcctttcccctataatgacattgatgactataatttgccatcctataactgtcatttagtagctgattgatgaagaagaagtaggcacccacagctaaacactgagccatactcctggaatcaaagagggatgagaaaaggagccaagaccattctggagaaacacacagaaacagttgaactgacctagtgatggcacagagaccctagtcataaagctgagggaaccaacattagatcgaaccaagccctctgaatgtgggtgccagctaggaggcctaggcagtctataggatgtctaacagtggagccagtgtttatccctagtgcacaaatggacttttggagcctattccctatggcgggatactattgcagcccagatagactaaaaggatggggcagactttgatatcccccatggaaggcctcactatccttggggagtgggtggggggttcagtgaggggggatatcggaggatgggagggagagaaaactggaattgatatgtaaaataagaaattaaaattaaaagaaaaaacaaacaaaaccttgaaacctgtcatgtaactccaaggtacatgtcactgtatgtaaataaataataataaaataaatgatgtatatttctgcttgatttatagaattgctctgaatatgcaatgagcctatgtatttaaagtgcttagtgtgtcacctcctaccttccatacagcatgcacccaagctagttggatgtgattatttactgatgtctcttcacttccagtatttagaatcagcaaaattactttttttggggggggggggctccttactgcatggtttgctagtttcacagaatttatatctccttttttcctgaattaatcacctcttgttccatcgggggttttgttgtctttatcaaactttagtagaagataagtttctgtctttgaccaccctatgtggagctgaattatattaataactctcataagtcaacttgtggagaaatatcaagcaaatgaactattttttttaaagtaccaaagatgttttggtctcaataaagtgatgcctatctctttatacaatgtataaaaaaagttagatggctatttggaaaattctccagttcattacttgtttgacctatggatttttttaaagcatctgtagaagagtcagagagatgtctcaaaggcacttgctatgtaagctgaaagaccttagttcaatccttggactttaaacaaatgtggaaaacataaattactccataagtatgtcctccaagctacacacagatacactatatacatacatgtatatggatagccctgtgacttatatttatatgtatgtatatatgtatgtagctgtgtaaatgcaatccttgaagtcccaacaatggcactcctgattgttctagggaatggcaaaaggtcttcctttatttatatatttggcctgtgttctggattcagagcccctggagatgaaatatgctctgagctttctatagagaaaattaaagctccattttccactctgcaggagaagcatgccccataaagcatgggcacctggacagccctcagtgatttgtggttctttagcgggtcacccaagctcatttacataattgttttcccctttatttctggatgagctaaggacaaaaataaaagaaattaattatttaatattctagagtcatataacttagttggacttaggaaatcctagcagctttcaaatgccacagaccttgaaataatgtgttataagtgtgggttcctgaaatgtgtcatttgatggcattgactttccaatgacttttatgaatacctttacttttctgaattgtattatgatgtattattcagatataatttgtattaccttcatctgttgacaaaaacataaaaatgaagtttcatgagcacaaaagttgcttctaaattgttatacaaacagtgggaaataatgttcccctttgaaaggataaaaatattacatttttaaaaccatcatatggccaaattacggtggctacatcgacccaccttcattgatggaccccaaaacaaatgataaaaataacacacattcaaaagttggccatcctttttctagatcaccttaatcttaacatatagcacacagttaatgggagtcttgttggactatttctctctatgaagaaaattttgaattttgtcattatatctgaagtaggcccatatgtcctaagacctgcccattctaatgtcatcactttggatttgattttactagtctttcctagttcctgtatggatgtaacttttcaaggtgatggcataagaattaaatgacataattcagtcagattgacagtgcagaataggcagaagtttcctgttacagagagaaatatgagtctgaagtgtcacagagtacccaggaatctgtggccacttaagagaccctcttctactgtggacattaagacatggaaagaaatagtcatgatgtcagtggtgagtgtaatctcatgattccatatggtctgtatagtgagaatgccgttacttatagaaaagccacagtcttccaaattagttgtgttctttgtttctaaaaaggtaaaatgtgtaagacatatgaaacttttagcaatgaaatttttatttaaattctttaattactattcatatttacatatgcacacccccattctgtcgccctcctatcctcccatgttccccaccaacccccacaacccattccccagtccctccccagggatagtgagggcctccacgggggacctttgtctgtcatatcatttgggggagggcctaggccctccttgttgtgtctgggctgcaatagtatccctccatagagaatgggttcccaaagtctatttgtgctatagagttaaagactggctccactgttagaggtcgcatagactgtcttggcctcctagctggcacccacattcagaggtcttggttcaggacaatgttgtttccccggctttatgactaaggtctccatgctctcactaggtcaggtcaagtgtttctgcaggtttctgcagcactgtcttggctcctttgctcatccctcctccatctccacaactggattccaggagtatagttcactgcttagctgtgggtgcctgtttctgctttgaacagctactgaatgaagctttaggaatggtaaccaaggtaggcatcaatctcattataggggaagggcatcagtggcatcttcaccaccactgcttggattcttagttggggtcatccctgtggattccctatcatttcccctgtgccagacctctctccattcctgtacttccacagggaaggaatagaagagggcaaggaaggagatgccttgatagcaatgaaattttcaacatttggatccaacaaatatacaaattgagttgaatttctttgtttggccgcttttttggatagactttgctatgaaaatttattactattgaagtttaaagattatgcagaatcaagtcttgaatgctgtacacacacacacacacacacacacacacacacacacacacacacacacacgcattgaagatatcctgatgatactagaagcttctacacataagacttaaagtttggtggagatgatggaagaatatgtaaaggtatttttggtatagtaatttctaacttctaacattaattgggcaattattcaagtttagccaaacaaatcctgaacaaaaggaatattgtaagaggcattaccttgcatgatttaaagttatactacaaagccacagtaataaaaacaacttgtttctgttagaaaataaacagataggtcaatggagtgaatagagaacccagtttgaagtccacacaactatagctacctaatattttgcaaagatgcctaaaacacacattggaaaaaagacattttcaataaatggaactaagaaacttggatatgaaattgtaggagaatgaaactagatctttattttaagacctgcacaaaactgaaccccaaatatatcaaagacttcagaatgagacatgattccctgaaactgttgaggaaaaatcagtaagcacatttcaacatgtgggaatcagtaaggactttctgaatagaactctggtaatgggagtagtagtgccaacaatcaacaaatgagatctcatgaaactaattaccttttgttccacaaagtaaagtgtcaatcaggggactaggaagcccacagtaaaacacggaaaaagagttcaatgtatttagccattgtagaaatgcatattaaaactatgttgggtccattttaccacaatcagaatggccatcaagaataaaaatgacaacaaatactggggtagacagagagaaaggaaactccttatctattgttggtggaagtacaagtctgtggcacttttgtttgtcaaaatataaaatataaaaacaaaacctaaaattagaaccatcatataaccaagtataccatatattggcacataacccacagcactctatatcccattgtggagactttttgtattcctattcattgttgctttatttaaaatagctagaaaatggaattcaccaacatttccattgattgatgaatacataataaaacaatggaattatatcagctgaaataaatgaaaatttgaaactatgtaactagaaaaaaatactaggccagaaaatcttacactgcatattgtgtctcatatatggatgctaacttttaatttttagctgtatataattgtcgtggcccggcatgccttagctccaagccacggtagccatgaggttctgcttaagtgagggagcatgcactgggaaactcctagcaacccatcggtgataaagaccaaacgcaggcatcttgtcatctttagagagctctcagttccatgctgcaaaactggagtctcttccttattgttttgtagtgctgagagacactatgagactcttaggggaggaggagacatcgatggtcttatcttactgtgcactctatgaactacaatactaacctctcaggcaaaatgagcccacctgtgtaatagtggcatgatcataagttgaacaatcaaccactttcttcctagattttaggtctctcttttccatctgaggaaatccatatttgtaccacaaatctggcaaaaacaatttaattggggaagtcctaagggagggaacttactactgttgtttagctaaattgtcataacatcgagctgtatttttaaaaatctttgtttatactcatagatcaattctattctcagccttaatcaaaatgacctcacttttcagtggattacagggaatacagagacttatacctgctcaagattcgagagtaagtaacagttgaatctcagcccttctatgactaacacaaggtatattcatagaaattccaatcaggatcagggaatattgcacaagatgggatagaaatgtgtagagctgtgaaatgccatcttctgggcaaggaacaaccaataaaatcatgaatgcataacagctttattttcctgcattgggcctgcacctgactggccctgatgacagtccatcatggattggggaggttctatgggctcctaaaattcatggctgtaatcttagttactaatatattctagaagagggaaagttaatagctaatgtctttcagttgcttaccactcataaacccaccaaggtttcaataggtagttgaatattggtgagactattctgttttctaactttatcagaaataacttcaaaacttaaaagtgacattttatcttcatcatgtgaggcattttataattaaatgtataactacttcttaattctttaaaaagaattaactattgtattggtcatcttttaatcaatatgacagaaaccttcaaaaaattaagtgaggacatttttgttctggcttatagtattaaaggctctatctaaggtgaatagagtcattgcttgaacctgaggcaggacaggatatcatgatcacaacaccatgtagcaggagaggttccccaccttatggcagtcaagaaagaagcatagacaaaaagaagttccaggataggctatgcccctcatacatatgacaccaattcagcacagtgtttccaagcacgctgtagaaagggtggagtggagggctggtgaatgcaatttgtttccttattacactgttcccaagcatgaggagcaaggtatttttttaaaatatttgatagcatttcaatgacagtcacatgcctgtgtctaggtgtaaatagagaggggtactggtgtgttggtgaaatacagctatcactgtgaaaggtaggcccctatcaatcccacactccatcttcagtaaaggaagtaaggtaccaattctcatcctgaagttcagattctactaacacatacacggaaaaataattatatttgtgaagatgttttattaaaataaagctatatcctagatttttgtgctggtttgaatgagaactatccctcataggctcatgcatttgaacacttagttccaaggtggtggtgctgtttgagaaggttatgaaacatttagaaggtagaatcttgctggaaaaaatagatcactgggatagaatttcagggctgatagctttgtaccactccctgttgtccttatctgcatcttatatgtgagcaaaaactgattgcacccagcttcctgcttcaagctgtggcttgctgactatcatccaccatccaagagagcacacaacccctgcctctggttcttatcctcatgtatccccagagaagaccacatccactggccaaaccactgcaatgcaactggctatcagaacaaattctcataacattcaacacctatttgtatcaggtaaactactagaagatacagggacacggcattcaagagctttattttataataaaaatggttttcttccccctgtgcaaaagtatgtcagtgttgtagaaaaaggaataatctgaaaatacaaaatttcagggccttgcatacaaattatgtacagtcctagactaatttatagtctagagaaatttaataatggtataaatacagtataaaacagttgaaaatgtggggatactgacccagaggagtagtccttatacagagtgaggggaaaatgtccatggtgaaggacacacagaagcaaggttggaattgagaaggctttctttccaggtacagacaactttagtattgtaacctctaagtctcaaattaaacttctgtcttacaaaatgtttgctgtgaaagttggaatggatatgatcttcttgaaaccagattcaaatagaaagaaaagcattgctcaaaattttcctgacttgtcactctatatcacagcagaaaggctttgctgtgatctgcaggaaaagaagcaaccatgaagggtgaggtaagcacagcttgactgtgaacgcttgagatgtactctgtgtccagagtcctgggaacttgtacatcagtcctcctccctcattctagctcttctaaaattacagtgagtcatataacaagcccagataggttgtaggtagagaaacaatctgaccaaagggggcttaagctccacttcctgagaggaagtagactccacagaagtaaccacaacagacttacaatgtgtgggtatttggtccgataagggattagtagagaaggtggcagaaacttctgtgactgaataggagatagccaggtagctagctattcgtcttgtggcaataattgcacccagagaaagtgttactggaatagtgcagagtgagagctttatgcccatgggccaggatgactcctgtcagcaggagatggatgagtctcccaggaaaatagtctgtgtccaaacagaacacattttcatcacccacctagtcacactgaaggataggacatctcagccacagaccagtaagaactagaacaacatgggaacataggcactcaacagctatctctagcttcccaaaagtcactatttttgtattcaggataaacacttgataagcaagactactaagaacactgaatataagagagaatgaaatatttaattctagcatatatcaggatacattgaaggttcaaggctatttaactttcagcccctttgaagggaattttttgattaagatatctacaatttacacacatttgcaaaagtttgactacatagtgtctgtaaaacttgcatctagcagaacatttattatgcacaggatatatttgttgattaaaggattacaaaaataacatagtatgttatcttaaaaaccaatgttgtacataatatctgtactcaaaggaatttttacagttacgtggttctgtatatgaaaaatatatatttaaaccaaaatagaaattcaaggcattttacaactgattgaggttattacaaaggccaagtacaaactttgaaagtacaaatttaaatgcttatctagaaaataaacctccaaattcattaactctccaactgccttggaataactatactttttcttatatttttcggggttttgttctactttattttgctattgagagttaataagcctttagatgactcttgttttctgcactagccataaaaattaactttaaaaaattatgtaaacaaaggtacaaactgttgctactttttgaatgttttttgttcccattgtgatcatgtatgggataatacagcatttagcaagtggagccaacctactgtaaagtccttaggtcattggtgatgttgttcttggacggatacatttgtcccataaaaggagtcctcatgatcttattacaaaagcctgggtctttctctttggatacagaatccattcctcatgtgaatattctcttcatgatgccacacagccaagagcatcctcagaaaagctggttgatgccaacacagtgtcccttgaacctccaaaactttgggctaaacactccttttattctaaagtggtttgacttgagtactttactgtagctaaaacatactgagtatacaagtagatcaggcaaaaggaagagagacaacaacttctgcattcaatacatcaatgcaatcaactggctaccctaaatactttgcaaagagtgaatgggttttctacagtaactggaagattttaagacataaacagaaaacaaggtattattttaacaaagataaaataagaactaataaaactacaccataaaatttacagtagaaaatttaatattacaaacattacacagacacactagtagctgtagaaccttcaagaataaagcaatttgaatgaactaaagggaattacagcttcagccacagactttcatcttgacacatgaatctataagacaaagttaaataaaatgaagctcacaaatggaacattaaccttaagctgcttgctggtttggattttgtgtttgtttttgtaaatgtcattttctccaggcactgaataggacgtccatcccaatacccaaacagtgcctgtgctgacaatataaagcaggatgccgagttacaacatccataaaattgtactagttcttcattttacagggatttaattttacttaactggattatcatcgatcctcttgctctagcagctcactttatcatgattcaaatatcacagtagatatttttcttagtagaaaatcattttgttttacatatccaactttatctacttttcagaaggataattttgtttcttccttgtctggggtgatctacaagatcataaactcttgacagtctgctgtcaaatgattcaaaccagactagcaatggggtcaggtttgccgatactgaagcatcaattggctgtttgataattttcctcaatagacttccaaatgatcaatggatgttccatactgatgaaaaaaatcaacgaaagcatctatcttgtctgttgtacaatgttgtgggttaataagggtttttcacaaggtcaaggagctcagctctttactcaaaatcccccatttcctactgcgcagattttatacatccatccagaatgcccaaagcaactgtgcagctgaactcctatggatcaataagcctacacaagatttgtttccaaggctgcctctgagctctcctgatgtcactttgtgcttgttatctcctgcatttgtgactaacatggtaataacatatggctgaaatgataataatgcagcatacaacacaatttaggagacaaaggcacagatatatttttaagactgtcaatgagaatatttagcagaaattctcttaccttgaatttaagaataaggaacttcaagaatgatatggtttacatagagaacaaagcctaacttccctcaaatatgccctttttagtaaatattcccaggagtggatcactgaatacactttcaccaagacattcaatccatgggttgtttgtatgcttttgtcatctaattagtcaaaacatatttattcagaatctacttataccatccatgctataggtctcagagacatcatcaagaaacaaaaagtatcatccctgtgctcttaaaatgtgtgatctacttgtgagaattgttaaagccacctcaagaaaatatgtgattatgtttccatagccagcttattagaaatatggtacaaagggttctataaaataaataataataattaactgtaatattttgagtgatcaaaaacatgttaaggggactgaagagatggcttagcatttaagatcacttgtttctcttatagaagatctgggtttgatgcctagaacccacataatagcttacaactatctgtaactctagttccagaggatattaggtcctctttggtcttctttgggcaacaggtacacatgtgctacccatttataaatgtaggccaaacatccacatgtaaaataaaatagtcttcaaaaacatttttaaaataggcagaacttaaatttacacaaaaaatggttattggtttctctttcttgggccagtaagatgactccctgggtcaaggcacttgtcagctgcaatgtacattgtactggtgaattttcacgtgctgtggaagcttgttaaaaaagcaaagttgaacacatggagaccctctgctgtcaactccaaagttccctctcctacaggagatcctcaactttttaataagaaaagcaagaaaataaggcattttttaaacattgagctcttgagtacacattgaaggtaaagcttctaggttactgttgttaaccccataatatagaaatgcccacagtgagaatgggaaaccatatgttaaggcatggttaactcatccataaagacaaagttcaatgctaggtaacatcttcaacttctctggttagtttattctgtatattgtaagcatagacactggatttggtgatggtgtatatctactaccatgcattctttttctggaagccttatgggagaagacattctgctccagctctaactcctttgacaggagggaactccagctgactgcctcaattaatttcccagctatttctactggatggttctaagctcccaatttgataatgttatctttcattaattttctccattgaccccactgcttacctgttgagagcatttagtagaagtcagggcagcaggggattgaagcagatggtggtatcacatctgcaatcaagaagcagaaaatggtgaatgcatgctgttgctcagcttgctttctcaacatacaggccaggctctcatccagagaatggtgccacccacagtgggcagatctttccacttcaattaacataagcaagataatctccccaggcatacccagaagccactcaggaggcaaaggcaggaggatctctgtgagttcaagaccagcttggtctacagagcaagatccaagacagactccaaagctacagagaaaccctgtcttgaaaaaccagaaaggaaaagaaaagaaataaagaaaagaaaacaatttggccttaccagagaaactgcttaccagattgttaagcaaagtgattgtttgcccatggtatttacctgtgcctccattagggtaagtctttgaggcttccttcctaattaattatggtaaatggatattaatcatgttgcagaattttgcaaattaagatacaataagtgtacatggcaggcaatacctattcagagttcctgatggccactgcacaattggggaagccaccaggtatgtgatagcacattgcttaaaatgtttttcatatttgggaattcctaaaattataaaaacagataatggatccagatagagtagtaaagtatttaagcaattttgttcccaatggaattgagcataaaacaggtatttcaaaacaaactaacaaccctccccaaaaaaacaaaccttataatcctataggacaaagaattgtggaacatgcccatggcaccttgaaaacacaacttcaaaacattaaaaaaggggggagttatattctccatcaacacataatgcattgaatagtgccttctttattttaaatattttgaatgtggatacctgtaagcaatctgtcgtagacagattttggcctgatggcacttgagtgacttttgcacaagtgaaatggaaggatccttgcaatagattttggaatggacccagcactgttttgatatggttggactagagtagctcaaacatatcttttgaagttgatagcagtaatgtgtctgccagattttagaaggaaaggtaaaggttcagaactatggaatcactcagacctcacccaccacaaaaacattttattgtcctttggatcatatttatgagaactgtaattcaaccgattgtgcatccattattaattatcatactagaattattggtattgaccagttaatatttgtaaccaattctgctcacactgaaagtgttgatggatgaaataaaaaggttagaattcatttgaaaggaatttggcatgatgctaatgagtccttaggttcaatacaactaaaaaagcagagttggattttgatgcagctgaaactgctggagacagcctgtaccataaaagtggccattccatcttggacatcctttattcctttatctggaggtattgcagccataggagcatgtgtactgcttggcataatttgcttgcctatgatgatcaagtaattgtgatctctagatggaaagttggttcagaggtacatggcatcaagctatgcactctcccttaaccctttataaacaaaagctggtagtcaaagatgggtaagatctttttgcctccagtaagcctaagacagggcattcatgatgagatgtgtgtaccaatgatgtgtaagtctagaaggttgaaaagacaaccatagaaaggcacagtcattaataaataaataacatggggaactgtgggagcccacagatatgactccattccatcttgacttaaggtcagagagttcaagcctattcttgaacctcaaagctcaataacaggatgtttgatttaaggcatgattaatagatgttttactctccaaggccaaatggcaggatgtttagcaaagggcatagttactggatgctcttaaaattaaggaagtaattacactagttttttccttgtatcatggtagggaagtctttctcccttcccttttgctttgggtataaaagtactatgcagaatagaatttgcatagtactaagagccctcctgactcttatcttctgtcttttgtctctttcttttctcaatcatcactacccctttcaggcatgttcagagagtttggctagttttggacatatagctgtgaagataccatctatccttgaaaatctgaattctgtcctctgatgccctcgtttcatacatgttagtccacatacccctcccaataattcttctcacatctgaacttccatgggctttaaaaatatgccagttgcactgtaactttctttatacataaaaatcattctcatcaccacagcttgtcatcttgatcctagagaaagttacttgttaacccatttctatttagtcccaatacacagattaccagaataatgtgttaaaacatgaatatttcttcaacacatccccattaactgcaagcgcttgtaagatgaaactgtaatgatttttttcatggtgttgaggtcacattgacttcactgacaccatgtgctgtgtctgtagacatctttgaccctatgttctcaatgtagacattttgttcctgtgttttatgactttctgcctgtaacaggccaaaccaatttgtttcctagagcttttgtcactgttgtggactgcttaaaataacaaaaacatcattctgatcctcgaagttgactactccctgatatttttatcacagcacagatgtagcccattcaggaaagccaaccccagttttagccctgcactcaataataatcctagtacttaaccactgtcttccctatccagtccatattcgctcaccctcttttatattcctcctagcctcatagccatctgaaatttttgcctttctttttttcaataaaaattcatttatttctaattctttaattactattcatatttacatatccatcccccattcccttgacctcctattctcccatgttccccacaaacaccctcaaccaattccccaactcctccccagggatagtgaggccctccaccagggaccttcaaagtctgtcatatcatttggggagggcccaggccccccttactgtttctgcgctgcaacagtatccatccatagggaatgggctcccaaagtccatttgtgctctagggttaaagactggctccactgttagaggtcccatagaatgtcttggcctcctcgatggcacccacattcagagggcttggtttggtccaaggctgtttcccagctttatgacaggcaaatggatagaactagaagaaaccatcctgagttaggtaacccagtcacaaaaagataaacatgatatgtactcactcatatatgatttttagacataaagcaaaggattatcagtctacaatacatactgccagagggactaggaaacaaggaggaccccaagagaagattacatcatcccttgaagaaggaaattttcacctttctttgttcactattttccacatgatagtgaacttttttcctcagcaaggacttcatttcttgaattcattgttggattcttggtgtctaagatgattcctggaagttcagcttaactttatggctttattgactaaaaaattagtgaactgtgcaagtattaatttatttctattttccccaaccatactttaaacactaagaagccaaatatttctgtgtgtgtaacatgcaatatagtgtaggaattcaattgatgtattttataactgtctgtgaaaaaataagtaccttctaaggaaattattaagggaatacttaaaaatcatgagcatgctgaaatcataaaggactggagttttaacctagaaatgttaaaactataattaaacattatatcattctcatgaaataacagatatttttagtattgagctttgcaaagtttgaaagcattcagttcataatgatggtggcaatttaccttattggccaattattttgcttttcaaatataacaagcaactatatatgtctctgttttgtttgtactggtatttatttgtacttggccatgggtaaaacctaaaaccagccacccgaaaacataagtctgtttgagacactcatcagcttagatgtcagacagtattacaatgaagcaaaatcttacaactgaaagtcaatttacctccaggttcttttttaaagatgctaatctatatgcttttgttcgttcagaatttgctcacagtaaataaagaataaaaatctggatgtcatggccattttctttctaagctaatttacaagaaaaagaaatcagtctccacaggtgcaaagttactcaaaaagcagccattccaaaacccaagttgttattaagatagatgctatggttgaaagtcagctttgagggatacttgttacatagacttcaatcccaaatctgaaaaacaagtggaaggagaaattggccctacaattgaaagatgaacctgggagagaccctgtcttgcagctggcctcatgcacatgtccagatagaatgcagttatggaccagtacttcaagttagagggtcgctcaatgtgctattgaggcagcagctgtcagggtcaggcccagcagggcacagtctccttgcagggcgtgatactccagcatctgctcttccatttgcagatccacaaaattgaaattgtcagtgtgtctgcatttaattaatcgcttggaatttaaaagagactgatatacaaaacagagtgccaattttgcaatttacactaaaaaaatgtaactgctatgcagttcagactatttatatcagcaggggaatgcagcctcctaatgacatgaggtaagccacagcagaagttcactgggtgagcagagagctacacagaacaagatgaggaagctggccgatctcagtaaccagtgtcaccgaggcctgacacatccatctcctcagtgatttttcttgattaaaaaaatcaagacccttggatttgctggccattgttagaaatgcactgctaattcttctcactgcccctccttttccctagatccctggatattcataaattctctcttcattaacatcatcaatgtcattaaatggaatacatattcatttagtaaatgaagcttcattaaaaagtattaacgagctgatatttattgagaggtaataaggactagatgaatgctaacagttatttctatatttggaaaaaatactgttgttacaaaattattggtatgttagaaaacaatttgaaaatagtgtacatttaattttcttatgtgcatttttttctgagaaatactagacagacagaaagcttcactcaattaaaacaaactgcttagaaatacacagaaacatcaaccaggcattcaaccacctctcatcttactttgttcatcatcttttgattcatattcagtgttaaaacatttcagacaatttcagagaaccttccatctctcaatctaccacaacttgccctgccttgtctgacttccagttgactctaggtcacatctgctttaatacctatgaattccctagatacttagcacatataaaacagcattgccatttttgttaagatcatatcctcttcatgaatgtgcttcaggaatgttttcatactgaggctccaattcccaaaaatcttccagctttaattgtgttattttacataataggttgtattgcagcaaaaatggtggtagctttaacagtttactcaattcctacaaacattattcatgtgagaaacttgagagccaaggagctcaagtcatttacccaagaacaaacacataaactgaaaatcaaagattcaggctatttacctgacattctgtggcatcttgaggattcagattgttggataagtcagcctatattttaatgtactttttaccaagagctcatgctatatctcatatactcaagagtcactaatggctgatataaagaatatgccctctggaatcctgttctccaaattcagattctggcttagtcactgacctgtgcaaaaatgggcaatagtctgtttttttttttcaaattgccccaggaatctctctctctctctctctctctctctctctctctctcttctctctctctctctctctctctctctctgtgtgtgtgtgtgtgtgtgtgtgtgtgtgtgtgtgttatctcatttctgtgaccaaatacctggccataagcagctaaaagaatgaagactgttttgactcacagttttagggtacagatcctgatggttggaaagacatggagtcaaaagtgactcttgactgtggtgacaggaacctgaggcagttagtcactgtgtatgcacagtcaaaaggcaaagaaaggtaaaataagcttcctccttcgtgcccttttaatcaatctggtcatcctatgatagattcaatatgaattcatgttatgtcttccctcctcagacttttctagaaaactcttgcagacatacacagttgtgtagctcttggcaactccaaatctaatcaacaacagagactgacttttacaccttgcaccatcaccctttgtaatggattgtctaagagacagacacaattataactttgcccttgaaaatgattttcccatcactggagtctgggaagccttgtaacattctggtgaacaaaatgaaacagaaatgacattgtattggcctgaagattaagtctctggactgctttcattcttcactcactgccctggaatgctgccaacagtacaggaacaagtccagactagccttctagagaattagtgaagacaccacccagtcataccaatatcctcagaggtagaaacaacatcccaaaatggaagagagatagcatagactctaagcctcaagtgagccaacagttaattgcacatacaccaatgctgccaaccaggaatcagccaaaccaggctcatattggcagaattattatattctattactaggtttcatggatattttttacatagaataagagttggctgatatatttaatgtttctgtaatatatttaatgttcaatatatggaacatagaaagtagtgttattgtattaaatgagtttaatggattagatacttaaaatcacacttagattttaaccacttgtgattggtagtctttatgttaaattgacccaagctagagtcatctggaaagaaggaactttaactaaaaaataccttcctcagactgtcctgtacacagcctttgtatcattttcttgaaataagaaccaatgtggcaggatccagaccactgtgagtggtgccactcctgggcacattgtcttgggttgtataagaaagcaagatgataaaacatgagcatagaagcaacactaaatgaagcgtttatatacttgttcactcatatataacaataacattaataaataaagaaaaagatgccatgaattttagagggagctgggagggttagacagggaaagggggaaatgatacaaaattttaattttcaaaagatgctaattcaaacaataaaatgaaaagaaataaaacagaaaagtaagtgaaccatgaggaatgatccagtaaatagcactcctctatggcctctgcctcagttcttgattccaggttcctgctttgagtttctttcctgacttcccttcatgatggaatgtaaactataatatgaaataaacccttttctccctaggttgctttttgtcatgatgtttatcacagcaataaacaaactaggatacctctgttttgttatagactatattcaaaaacggtggctcatgaaacaataatttttcattattcttatcatcataattattataactcaaagttctcagtgttgctcactcagttcagttgggtccattcttttgttttgttttgttctgttttttcgagacagggtttccctgtggctttggaggctgtcctggaactagctcttgtagaccaggctggtcttgaactcacagagatctgcctgcctctgcctcctgccaaggagttctgggattaaaggcatgacaatggccagggctggtatcaaagtgaatacctttacattcacattatacctggggctcaaatatttggagggacttaactgcagctcagatcctctttgtttttactccttcctctcttccagataactccaagttatcaccttgcattagagtcctcacttctcagttgaatattttgagagtgattttcctaagaaatataggcagaagttgcacagacttttaaattttaggcacaaaaactatatagtgtcactttggacattctgtttagcaaggcaccactgctcaagctcaaaatgaacatgtactcatattgatgcatgccatgtcagatatgttttaaaaccactatgatttctttgcatgcatctctcattcccatataaaatctacaaggttagtaacaatttttgacaagaaaaaattttgcatcagggagattaaataatttcttaaagattataaaactgataatttctcagagccatcactccacctggaatgctctaagtcaaagactataattttaaccagtatgtgatactactaattccattcatcctgtgtaatttcagtccataacatcagagggcacaataaccaagataaaagctatctaactgtcatgcccatgtatggcactgtatatgttcatatacaaataaatcaccaataaagcattgttctcaattcttgtcacaagcctgtttatatatattccactgctataaaattgattagtttacaggaaagatgaaaaagaatcctgtggggtataaaaattggtaaatatctcttctttacaacatagaagctcatgtatcttttagttgcatggtgtgttttagattcctcaaccaaagtttatgtcccatgaatggaacaaaagatgagtaaaggtctaagaatgaggcaaaattgtcaaattactgcttaactccagattaggagacagaaaaagagtgaagaatttggagaaagccaagaagtggagtagaggtaaaagatgtggcctcagaggcaaaacagttaaggtgcatgtagggatgtagctatatttgtctttcttgccccttttactctctttccccttctatctacttcctctacccttcctccacctcatagtcctcctactttcatatcatcacaatataaatgtatatttctagattccatttatgaaagaaaatgtcatctttctttatgtagatctaatttatttaatgtaatataatgatccccaaatctattcattttctgccaatgacataattttattctttagagatgtatgaatcttgtgtatgtgtgtgtatgaatgtatatggaggtgtcaaatttctgaaattatttcatactgtacaataatagcattgaatgcaagtaactctccacttaagagctgcagagtggtgcagtctatttgatgctgtgtatgcttcacataccttaattaagcatctccccctttagggtggaaaattttcctcggatgactttgttgaaaatattttctgtttctttggctgggttttcttctccttcctctgctgctattgttgatagattttatctttacataatggtctagatttcaaggatgttttacgattgtattattgttgttgttgttgctgtttagatttaacattttctatggctggggtacctatttcttctatcatctattcaatgcctgagattttctcttccatctcttggatcctgttgatgagacttatctctgagtttcctattagagttcctaaattcttccttttcagatttgcctcagtttgggttttctttattgattctatttctactttcatgtcttggacattttttcttcacttcattccactgttagtatattttttcatagatttcattaatggatttattcatttcctctttagggacctctgaaatattctttaaaactattttaaagttcttaacttgtgtttcagctacactgcatttctcagggcctattgtagttgtgttgttggattctagtggagacatgtcctgactgctattgattgtctttttaagctagtgtctaggcatcttcattttggaatgattataattctaggtgctgatatatggtcttgcctttgttcagtgtatattccattccttgttttccatcacacttttttaggagatgtgccactctcacaaatagataagctagaaataaaaacattataacatcattaaatcttaacaaataccaacatcataatgaatcaggaaaccctgaacatatgttctttaaaattcttaccacttttattcaatatagtatttgaaatcttagccatagaaataagatatgagactgagtaaaaggtacacaaacaggaaaaaaaaatgtcaaagtattccagttagggatgatatggttctatacttaaaatatcttaactagtaacacagaagtctctttcatctttatgagaaatttatcagagctacaggacatatacattctactagctgtttcatgtattaataatgaactagctgagaaagaaataaaaatatccccctcatgatatcttcaaaaagcacattggaatagacttatccaataagtttaaaacccgtttataatgaaaattgtaatatacaacgtaagaaattaaaaataggcactgaaagatcctatgttcatgagtaggcaaaagaacaatgtgaaaatggctaatttgtcagatgcaatctacatacttaatgtaatcaccacaaaaatatgaatatttttcagataaataaaagtatttttaaatgtatgtggaagtataaaagatatcaccgttgagggtatgacaatacatgatattaaaatatattattacagagccacagcaatataaacagcagtagtattggcataaacacatcaaagaaacaatagaatattcagaaattaactcacacatctatgccatttgattttcagcaaaactgccaaagccacattttggaaaaaataaacactttttgacaaaagataccatgaaaactcaatatccacatgtagaagagtggacaagatccctatctgtgaccctgtataggaatcaattaaaaattgatcaaagatcttactatgagacttgaagctactaaaagaaaacagagtcataacattttaagacataggcaaagacaatggtctcctgaataggactcaattagtttaggaaacaatatcaagaactgacaaaagggatcacatcaaattaaagcctctgcatcctgaaggacataatcaacacagtgagatgactgcagagttaaagaaaatcattgccagctaatattccaacagagtccagaatatacaaagaactccaaacagttaccactggaaagaaaagaagtcatctagccaacaagtgtgcagaagagtggaacagatgttctcaagataatatgaatgatgaattattgtatgaaaaatgtccaacatctttaaccagaagaaaaatgtaaatcaaaactacattgagattccaactcactaaaatcagaattgctgtcatcaggaaaatataagaagcagatgctagtaaggttggagactggcttatacaatgttggtaggaatgcaaatgagcaaagccactatgaaaatgagcaatctggttgttcaaaaagataaaaatagccctaaagtattatccagctttaccattcctggtttgtttacctataggtaccagagtcaggatatataagagaactctacatgctcatgcttatcacagcattgttcaaatgcagtcaagtcatgcaatccacctaggtatccatcagtctatgaatggttagagaaaatgtgacatgcatacacaagaataattattgagctattaggaagaattgaattaactcaagaagaaggctcaaagccaggccgtggtggagaacgcctttaatcccagtactcaggaggcagaggcagtttgatttctgtgagttcaagaccagtctgatctacaaagctacactgagaaacactatctaaaaaaatgatgattcagtggtaaaaatacttgctaagcaagctgaccacttgagttctatcctcatatcccagagtgggaagcaaccaactcctgaaatttgtcctctgactttcacatgcagattgtgttgtacaaacacctgaagtcactaatatacaacatcatatacacacattatacacacacaataaaaaactaaattttaaaaaacaacaaaagaataaaattatgcatcagttgcaggattgttaatagaaccagcagtatcatgttaagtagaaaaggcagactcagaaaaataggtacctttgatattgtgttacatgttgtagctattaaaaaagacacctccaaagtaaaaaggagaaatattagaaaagagtaagagaaaataggataatgaaatcaggaaaataatactttcctcaataattccaaataaaggaactagaaatatacactggaaaaaaagacagcatcttcaagaaatggtgtggatctaactggatgtccacatgtacaagaaaggaaaatgatccatatatatcaccctgcacaaaacccaactccaaatggatcaaaggcatctacataaagccaaatatactgaacatgatagaagagaaagtgggggaataatcttgaactcattaacactaaagagttttctgaacagaacactgttaacacaggtactaagatcaacaattaatatatgggccctcaagaaactgaaaatcttctgcatggcaaagcacactgtcatctggacaaagaggcagcttacagaatggaaaaggattttcaccaactccacatacatcaaagagctaatatccaaaatatataaagcactcaaggaactggacatcagcaaaccaaataatccaacttaaaaatttgggtacagatctaaacagagaattattgatagaagaatctcaaatggctgagcaacactttaagaaatgttcaacacccttagccataaagaaaataaaaatcaaaactactttgaaattctatcttatacctataaaaatggttaagataaataatataagtggcatctcatagtgagaatgtggagcaagggaactacttctccattgcagctaggagtacaaacttatacagatactattgaaatcaatatggtggttcctcaggaagattggaattgatccacctcaagatccagctagacaatttttgggcatataccaaaaggatgctccatcctacaatagattcttgttcaaccatgttcattgatactctattcagaataaccagaaaatgaaaataatctggatgtccctaaacagaagaatggataaagaaaatgtggtacatttgcacatagagtattgctcagttgtttaaaagaaaaaaaaatgacatcatgaaatttatgggcaaatagatgaaactagaaaataccatcctgagtgcggtaacccaaaccaagaaaggtaaatatggtatgtacgcacttataattggacattaccctttaaataaatgataaccaagctacaacctatagacccaggaagttaggaatagaggaagggcctaggggggtcatatggatctccctaggagagtaaatagaaaagattttataggttgactggagtcttggagcaggggcacaggagggatgagagtagaaggatcagcagcaaagagaaatgggagatgagattgagagagggaataagagcagagacagctagaattaacgggcatttgaggggcattatggaaatctaatacaaccaaaacttcctataataaatggtgatcctaatgaagtctccaaataatgagggagatggaaccacaattggacatctcttgtcagcaaactaaacttccagaactgggatttggcttcatgcaaatgagtttttgcacaaaagggtcccatagaaatccccaatgattcaggctgttgctaagacgaactgacagcaagccccccttgcagaagacaatagccacacaactcattgaacatggaaaggtagagctggtgtttacacagaacattcaaccccatgttctagtgtccatgacaaggaagtgtgatctacagggtataaaaagagaaatggaaacatcaacccaaccacaaagctttttacctacaatctgtcttgcaggcaaaatgcgctagggcaatggtggcacaaaccttgttgtagtaagaaactgatgtctggtttgacttaaggcccactcaaatatacaaaacccatgacaaacacagtgagaacttggaacatatagctataaatgagatgtctttatcaaatccctcctgtcagtgctgaggtaaccccaaagaagtggaggcagaaggagttatggagacagagagaacagaggacaccatggagcaaggtcctctaaaacaactgagcaaagcatttacatgaactcacagtgactgaagcagcaaatcacagggcctataagggtctgcacccagtcctctgaattagtactatagctttcagtttaggacattcatgatgagtcctgaatgtataaacaagtggatctctgtttcttgtgccttctcttgggctcttttatttttctgttgacctgtctgtagtacaagtcagatactggggttaatgttgaagatcagagaagcaaagtggccagctactagaaagttctcacctctaccaatgatcataccaaaaggaagatccaccaaacttcagattgtatctgcagacttcactgctcctcaaactgcctagactgctctgagctcctgcctcatattcctcctagtgcagggattgaaggcatgtcatcccaagtactgggatcaaaagtgtgagtttgttactcttttagactgatttactctcatgtagcacatggtggccttgaactcctaacagcctgtgtctcctgagaactggcattaaaggtgttgccaccactgcctattctctatggctaactactagcttaggtgtgtggataactattggcttagtatgtgtgtgaataattagttgcttagatcttaactaggtgtgtaactaactagtgacttagctctgaactctgatcttcaggcaatctttatttgttagattacaaacaaaatactactacacttgtcttgtccaactttgaagtaatggtttttgttttattgtgttgtattttattttgttatattttgttttttatctgttagaaacctgttctttgctaatgagagatagaaagggagtgaatccagatgagagaggggtggggaggaactaggaagagtaaaggaggggagactctattcacattatattgtaagagaaaagaatttagtttaaataaaaggggaaatgagacaatgcaaacatagaaactcttttccagtgcttcagtgggaagcagaaatcaaccacatgaatgaatgtctacataatggaacagaggtgaggcacactttcctccccaccactcctagggcttgcttgaatctcataaagtcttgatttttccatctcttgtaacataatttggagtacttcgtgacattagattctcaaccatttttttcttattctttcactgagcttcattcagagaagaagtaggatgatggagaaatgaacagggagaactggaagaaatctgtgctgtctgattcagaattagcaaccgtctaggaattagttagttgaatattgcatccacttgagtcatgaagatcagagcatatttggggcatgtgtaggaagaaatctatttttagaatgagcaataatgtaaatattgatgacgttttcaaagagaaaataaggtatgttcccaattatcctgagaaaatgtaagaatctttagattctggggtgccaaaggatggtacccatgattctaaggtgaaaggattttgtactatctctttggaaggaaataaaacactcagattcatgggatactgtcaagttttggctatgaaatcttccccctaattccctaaggtagttttctgccagccacacttcactctttatgctgcaatgcttcaaacagggtcctgctgcttctcaatgaagttcagtcatttaagacccagatgaaataccttttttctgtaaaagtctttgctttgctcctccaaagtctctaatgggcacaagtgcaatgtaactatttggtttcgtggcaaccctcccttcttactatcaaaggcagaagtgaactctgtgtttctgtatcctagaatgatgcctggtcacacaaaatgctggataagtgctcattgaaaagtaataagtgcttctcttacttaaagctctgttccactggacctaactttgccacacatgcattaaaaagtggcagtcacagaaagaaagctaagagtctcttcaggagtccatgacatcacaataaatattctgacatttgcaaattcaccccattcagggagattgcatacattagcttaccaatggagtgtgtagccacatttctgtgatttggacctagagagaaacagagaggaagcctggaatggagagatcacaaatacacaacaaggtgagccaaaagtgccattccaaaacttaggattgtagactgtaacctagcagtaggtgtcaattctgtctcaagaccaagagaagaatggggtcaaaggccagggacataacccagaaactacataaggctcactatggctgccttactaatgcctcatgctgatttcctcaaaaccacttcaattaattcctcattctgtctgtaacaccctcaggagccttaaatgttttttgacactaaatttgcagttatattttttgttgtcacattggcccctaagaatgaagaagtcccagctgacatccaccaaattctggagctaaagacaaaattctaactcagtgtgttttaccatatgcacttccaggagatccttgatcctgccattctgagacattcttttccctacatagtgtgggctgaccagaatcacagattatagaaattatcaaatatggataaaatgggggaagaatattcaaggaaattctttttcttagtcatgcagtgctaaagtgaagtagtatttatctaccacatcccaaagtaaaagcttgttcagttatattacagtttgtaatgaatctgcattcctacttactcctgattgctcacaagcactcggtgtagccattctgatcccatgagagatttctatgtccaaaatgatatcagctctttgcagacattagctgcacctgtaatgaaaacaaaagttatctggtaagattgagcaataactgcacatgtataaaaatgccacaaagagtttaaattactgtctttatcaaactgactactacaataaagaaaatacttgctttccttccagctttatattcattaatataaagtatatcactacttttattccttgctttttattactaccagttcagatacatggttattcttgacaataaactattttgtactatagaatttctttttaaggagaaaactagattcttacagctatttcctcatttgttctttgggtctaagctattaactggaattttatggcagacattggctatggaaagatgagtacattaaagttttggtcttcaaagaactcaaaatgcaatatgagaaaacagataccacaaaacactgttagtactttgataacaaatctaataactattgtgttatgtaatgtgagttttcttggcccagctaggtcccattgcccttctctgtcccaatgaagcacatgaatgctatattattatacaactgttggccagagatttgggcttatttgattagctctgtctaaattaataacccatttctaataatctaagtattttcacatggttttctcttaccaaagaaagggtccagttctgttactcctcttgcaacctaccgtggtgactgactcagtgtgtccacagagaagagaagagaagagattaatttcctgtttgtccctgattatattctgattctgcccagatatatcacttcctgcctggccaatcagccaatcagtgttttattcattaaccaataagagaacatgtacacagaagaacattccccatcagttatcatggaggaagaaagatctaactttggatggatggagagatgtggatttgggaggacaccaaatgaaatagatacttagaagttgatttttaaaagaaaaaagtggaattgatttttttttaaaaaaaaaaagtggtgactccacatgggcccacaaggaagctagatagagaacaagtctggccttactgcctgtgtcctttacttgggccagttgcttacctctgtgggcccacatgctaatcactcaaggtcagtcagtatgtctaacagagctcatcctccctcaagctgtatgcccagagacaagtcattgtccttaacctgatgtcatctttgattcaaggaaaaataaaacctcttccagctgacttgctctccttcccaggtcccaagaaagtgcagttatccctgaggtctgtgcacatcctggatcaaaagtaatcatctaagaaacatctcaggacactttagaccactacttagcatcagaaatttagacaaagataaataagactacatattgactactactacttattaaactgtcttttaaccattctgcctaattattaaagtccctgtcaatgttcccaaagcaagcttggagtcattttaccctttatctgttcctgtgtctaaagtggccacatgaataaatcaatctctttctacctcctctccctgcttctcacccatatgtctctttggttgcaatgtcagggatgtggaacctaggcttttacccaaaatctccagtcacaagcatttcaagaaagatagcaggtagtctacccataccacactgggaattttggagacactcacttttggggaattcttaagatttgcattcttatatgcaaataataagttagtagaagaactgtccattaaatgcaaaatctgcataaatttgggctcatacctcttgagtttactcatttagcatgaattgcaaccgtagtctgaaagaacaaggcttaacaaataagctatgtcattcataataaagtaagtcgctttagattacttgacctacaaattatcttttgggaccataataaccttaattctaggttcactaccctccaaagatgcagacaaattggcaatgacaatttagtatcagtgttgttgtggtttgagtaggtatagcccctatagactcatgtgtttgagtggttggcccataaggaatgaccctattaagatgtatggccttgttggagtaagtgtgtccttgttagagcaaatatgtcgctgtgaagtcaggctttgaaatctcatttatgcttaagtcacacccagtgtgcagtttttccttttactgaatatgtatcaagatgtagaactcttagttccttctccagcaccatgtctgcctacatgcctccatgtcctgccaaaatgacagtggactaaatctctgaagctgcaagtcagccccaattaaatgtttcatgatctctcttcgcagcaatagaaaccctaacacaatggcatacacttgatgagcacatgttgttgagcactaggggataatgagagttgtgaacctggacatgcaaattagaacatcagagacagcaatgattatgaataatgttctgtgggaaagtatcaagtcctataaagtatacactttagaaaattgatgtatacaatagagaggggaataaagggtagacaaagtggcttggttacagatgtctagatttattaaaacaagctcatggttttcctgatttgaaaagaaattagaaaacagaaatcgatataaaaaatggatatatttatagttggccaaatcaggagaaaaacaaagtacacacacacacacacacaccacacacacacacaacacacacacacacacacagccaccacacacacgagcacacacacacacacacacacacacacacacacacacacacacacatgcacacacacataccactcattgccatcttaaaatatatataaataaggccatgaaacatatataaaattaattgcaagacagatgggttctatttttttctgagaaatgagaccgacctaggttccaagttgtctctaagtccatgtagacaaaaatgtggtcttaatgattccctgctttgaaagtttcaatgcaaagcacagacatcatcttcaacggaataagggatcatgtgtgagtcaatcatgagtgaacatgtcccacaaacgcagactcaggttgtactaaatagagggttccaatgtggatgtggcttcatgacatttttaggccacagaacaaaacaaaagcataaatggaggcgtttttcaaacacactgttgggcatatcagataagcaggtgatagccaagagacaaaatcttttcacaggtgtcagaagctgtgtaatgagattcttagctttttggattggtggaaactcatggctactaaagtgaagctttgtttacttgtcttgtccctgtgagaaaatatcctgacaaaagcataataagggagaaaattatttatgttgactcaaggttcaaggatacattctatcatgggccattgccatattagattgcaaccatataaaaagttcttgctgagatgctagtgagccagccctgaatacaagagactaacagaactgactctgtacccctcctcatctgccttgtactggcattggcagggggaagacgcccctgcccccttgaaccctactacgtaaggcaggagagagagctggccccagggtcacaagagtgagagaaatagccctgctctacaccagctacaggagaaccctgtttggtcagcacattaaagctgaccctgttgtcagtgtcagaagtgaaccagccctgatgatgtgagaacagcagagctgatcttacccccacctcttatgctccctacagtaatatgaagagaggtcctgtaccttgcctggaaaagcagtagagctggctctagcaataagagtgagggggactggggtctgagggctaggtcaagagcaagagaactggccccactacttgctgtaggttgcattgggtgagctacctgaagcagtgctggagagcttgccagggaaaatggcaatgagggaaagctagggagctaaccaatctagctatcacccaggcccagaaactgagctatgagttggcccaccccaacatctgctaaatctatgaactgctgaagcatatgaagggaatgaacctctatgagacaggacaaccacaggatatccaagaggagccccagtgagaatccattatcagtgtggcagaaaccagagacctcaagacagactgacttgtggcaatgaacatttgcaagtaacaatgaccagactaaagggtaaactgtgtgactcaactggctacaagacagcatctctgacatgattcttctttttgttgttgttgtttgttttttgttttcattttggtttgggttggttttgggttttttatttaaatttgggtttgttctagggagaaaggttgcaaggcaagagcatggattggaggagacagggagataagcagcattgcaatacatgtggtaaaatctacaaagaatcaataaattaaaaaaaaagttcttgatgaaaaaaatcttctacagaaaatagattcttttaaataattgatacccacatgctgcataattcatattctacacaaatttggttcaggaaagaaattcctcaaaaattcttttcaatttttaattacttattattgtttgcatgtgcatgatgtgtgtgagtgtggcattcacattccatggggcacatgtggaggtcaggtgacaactttggagtgtccttctctccttccagtgtaggtctcagggactgagctcatgtcattgggattgtgtgccaagcactttcacctcatgaggcatcttaccagcttgaaaaacactcatatgtcttttagctagtagtcaagcatggttaaatgggttaaacgatcagtttgttaaaaaaaaaaaaatcacctcatttggttttttctccagccatagaggaaggcaatttttcaattagaaaatgtgaccaatgtgccattcgctttttaaaaaccagtgatttccctctggttacctggactacatcctaatggactcatttgaatgaatgagtcattaaatgaatcatttttcttctcctcccctttttttggtaaaaagacaaagttataacaacttgtaattgtctgttaaataaataaataaataaaggattgtaaaagatctccattttgaagattttttaaaaagatttgttttatttgtattgctgtatatatgcatgtatctgtatgtgtttatgcacacatgtgtgcagctggctatagaatccagaaaaggctgtcagatatgctggacttggagtcataggaagttgttttaagagctgatgtggattctttgaactctggtcctctgaaagagaagctaacactgttaaaccattgatctattactccatcctcaagaaagccccagtttgaaatctccagaatatgtcattgaaatctaccagtcatttgaaaagatggcattccacagacgttaataaggataagtcccacttagtatatgaataagaaaagctgttggggggagggtgagaaatcagtactttttatttttttttttaagcctggctttgcaagcggtatatcgttagagaaagggttaaagaatggaggagatttcagtaggtagagattttgtcagcctcggttactgttttgtagtcttttaatagtgatatggtttagtgtttggatccacagtttatagaactttgctttagacacacttgttcatcttggctgaaaactttattgcaaataacacaacctgaaatggagttgaatgggggaaactgcacaccactgaacagtcaactgaacttagacttggtcttcttatgtcaagccactggtcatacattcttctgcagacaagttttcaatcttctaacacattttgtatgttttctctttaccccaatatgtccttgtcttagtctacctaacaatgactaaaggtttaatattgtcattgcctatacatatcttccagcataagttataatcttaaataagaaaaaacatatcactgactaaatactttatgctacagttaattatcacaaatccagttagttatttatcttacagataaggaacctatggttaagagaagccatggtactcaactggagatattccagtagagatgttaaacacaagtataaaatccaaaccgttgggcccctgccctgagtctataatatgcaggcttaatttcctgatacatatgaccttgatttatgctttctgctaaactaaaagcttttataaaccaagaatcaagttttgctttgtcccttcaaaaatatttgtcataatgctgtgcataaatttatttcaaaattctaggattgccagacactaagatttagcagataaatggtcagacagacagatagatggaaagatagataagaaagtataattgtttagagaacagaaatggataaataagggaagattagcagtggactatcaggaagaaattaaatttttttcaaatgtaatacttcagttctaatttatttcactcaaatcaagtaataagatacacccttacaaaaaatggctaatgtctctcctgttttacacttaaaaggatttattgctagtctcaagtctgtgaagcaatgtgagataaacaggattagttgtcttttattgtgttttccacagaatttaataccagttggggctgttaaaaatttatagaaacaaataagaaagtccaatatctgctgaagctctaatcccctctaaataaagaccaacttctaaattaccattttcttttcaaatataaacccaaacaactgcagtttgcagatgatcctagccttcccctgaagaaatacaatgtaagaaggaagggttgggtaggcagatacagaggaggaactgaagacactgtcatgcagaggtcagtccatcttttcattaagtgtatgaacacatggagtaccaagtacagaagtgacagtgaaattactcctcctgtggaaagaaataatttagagatgaagaaaatgcatctgtactctcagatatcaaagtccacaaaaatcattagtagcaaggtcacctgaagaaatcataatgccatctatcacattaaaatttattcatttgttcatccacaagtttaaaagatgacttcatttatcagaaagaaattcattagcaatagacatttagatatccaggattttctctcatattcagtagaactgcccagagagcagcagctttggctctgagccccaagccctcctggtcctactggaaactccaccctgccatcgaatcatacgcataaagctcctctgacatattactattttctttctcctttcatccagtgtggagcctatgatgcacagaatccattcaaagatgaatagagtatctatcattcaagagtagagtagtgtagaggtaaagtattcgtccaagtgttgtgtgtcttgtacactgtgaagatgtgtcattctgattggtttaataaaaggatgaacatccaacagctaggcaagattttcaagcacagaggatgctgggaagaagaagggagagttgccagacagacagagaagtagtagcatggacagtacagaataaagataacaaactcatgagacaaaaagtagattgataaaaatgggttaatttaagttgtaagagataggtagcaacaagcctaacaaccccccaatacaccccctatccactccccaaagatggtgaggcattccatgtggtatcatcaaagtctgtcacctcatttgggggtgggcctagccctcctccatgtatctgggctgaaatagtatccctccatagggaatgggctcccaaagtccacttgtacactagggataaataccggttccactgttagaggtaccatagcctgcccatgcctcttaactgtcacccacattcagagggtttggtttagtccaatgctggttccccagctttatgactggagtccatgtgctctcactgggtcagttcagctggttctgtaggtttctccagcaaggtcttagtttacataagtgacccaaaaaactctaccagggaactcctgataaataccttcagcaaagtagcaggagacaggtttaactaaaaaaaaaaatcagtagccctactatttatagacaataaaggggctgagaaagaaatcagagaaatatcaccctttacaatggccacaaacaacataaaatgtctaggggtaactctaaccaaacaggtgaaagagctgtatgacaagaacattgagtcatttaagaaagaatttaaagaagataccagacaatggaaagatgttccatgctcttggataggcaggaacaacatggtaaaaatggcaatcttaccaaaagcaatctgcagattcaatgcaatccctattaaaatcccagcacaattcttcacagaccttgaaaggacaatacttacttttatatggaaaaacaaaggatagctgaaacaatcctgtacaataaaggaaattcaggaggcatcatcatccctgacttcaagctgtactataaagctatagtaatgaaaacagctcggaactggcacaaaaacagaatggtagaacaatggaattgaattgaagaccttgatattaacccacacacctatgttggctctacatttaaacaaccactagtctcaaacattttacattggtatggatttttgtattttgatgcaaatttaagttatttttgttatactgttcatatgtttcttttcttgtttaaggtattgtacctatgcagctcatttaaaaaggttatgcaaagttttagtctttgaaagctatttaggacaataaatacagattaatagtcaactataattctcaaacttgtactcatgttaggtatgctttcttcttattttaatttagaaacaattttattttacatatcaatcccagttccctcaccctcccatactctcatgcctcccaaccctcacctcccgccaccccccactccccaatgagagtgaggccttccatgggggatcatcagtctgtcatatcatttgcaggaggtcctaggcccttctccgtgtatctgggctgaaagagtatccttccatagagaatgggctcccaaggtccatttgtgcagtagggataaatactggtttcactgtcagagattctgtagcctgtccgggcctcctaactggcacccacattaagagggcttgttttggtccaatgctagttcctcaactttacaactggggtctgtgtgctcccacttggtcaggtcagctgtttctgtgggttttcccactgtcttgatccctttgctcattcctcctccctctctacaactggatttcaggagtatggctcattacttaggtgagggtgctgcttcttcttccataaacttctggatgaagactctaggatggcaattaaggtagccatcaatctcattgtaggggaagggtatctagagcagtctctcctctactgcctagattctttgttggggtcttctttatggatctctgaacatttccttggtgctagatttctttttaaacctataatggtatgttttcaaagcatacagagatgtattttatatagataggtgttctccaaacacttcaaagactgacagaatataccatttaaaatgttttaataacataatgtttttcatgacaatgagacacgtctgctcctggaagcaccaatctacttcagagaagatgatgggtatcaaaagacctatatatggagtttgctttctttatggcaaaaggaagccttttgagcaagaaactgctggtagtatgctgtcccaactagactagcaacacacaaagaaacgtgactgctggactttgccaagatggggtaaggcagtccttgaaaaaatcctgcttcacagaaaggtctgtaagatattttaggcctatattcaaagattgatgatccaaagctgcagaagaatcttgagtgactgtccaggcagccttctgtttctatcatttcttttagttttggaagttgcttgtaatgcatttcctgtttattaaggtaatattcgtccccacctgcaggacatcaacctggggcaagagagtcagggatagggaatggggacaagagacacagaaagatcgaccacaagacaggattctgatcaagtgacaaactttacttttctcaggctagcttatatagtcaggatatggggaggggcagaatggtttgtttgtgcaccaggtgttagtgcaggcaggatattaggaagccacaaagaggatgtttggcagggtaaagagttcatgagtaagaggtccagggagggttgcccaggtgactgagcctgtgggtggaggactgggtcaggttgtttcttttcttgagctgaggttctaaggagctgctatgtaaaggttaactatgtggcctgccaagcatggcctaggatctcatgcccagccctgagatttggctcccaacaaatattatatccttctagggtttttgatggagttgtaggctagatagtcatagttatagcttttcttaattatgatagaacataaattaggtataaaactttgaactcaccaagacaaataataaagtattttctccaaaacagtcaaatacaaatggactaaacttcatgaatgtaattcttgcctgctaattgttcttaatatacatagctttactgtggagaggaagtagaatggacattgcagagtaaagttaataaagccatgagacaaataatagattgataaaaatgggttaacttaaggtataataagagctagttagtaacaagcctaagctgtaggccaagtttttataattaataataagtctccatgtcattattggggagccagtggtcccaactaaaaggtctgactacatcctagttttgttttgttgattttcttcttactcactattacccaaaaatctaccctcacttatctccatactatgtctggcatagggggcttaccagaaagggatacatacctatcccctgaccttcatacctccaagaggcactcaagatcacacaactttttaaataacagtaagtgttctgattgcaaaagcaaggctgagaacagttttggcctcagcaggcattaaggcaatggtaccaagttgagttacagacaacaatgagtatgttcagggtagtatagctataaccaaatagtattacagtcattgaatttttcacttttcaagtaaaagggagagaaaatcaatgtcagtttatgaatgtccacaattaagcagaaagactagcgttagcctccgagtctgtgtctttttacttcatgtgtatattcaggaagcatttctgccacattaaaaaaaaatcagatatttacctcctcccaaagcactgttgctattcttttgagctacttgctgaactgcctgctttttgtgtgtggactaatatttggaaataagatcaatatacaaactatgattatggagaatgagagtttggcaaatcttttatcaaaaaataacatgagtctgtcacttcaagaaaagcagctgacaatatttgttgccaataatacactttatactttaaaaaaaaagcaataggatttttgaaaacttttattagtgattgtgatttttacactgtcaaataagtcaatatttggtagaactacataatttattaaactagtatcttccatatgatcaaacttggaagcttcaaaatcatgtaaggaagattcaaatatgcaaaataaatcaatgagtgtcacccaaagactgtgtgtgttgaagactttgtcccaggcttgtgtggtgctattggaaggagaatgaaccattgagtggtggtactctattcctcatattgtgtcaccttgtccagctttaatacaaggggaggtgcttagtcttactatgacttggtataccatgttttgttgatatccatgggaatcctgcccttttctgaatagtaatggagaaggagtggattgcagggagaaaaggtgggggaaagaaatgggagaagtggagggggaagctttgatcaggatgtaaaataagtaaataaataaaaagagataggccctaatgaaaagaagtcaggtcattgggggtatgctcttgaagggtatagtggaatgagaggttctcctattcctctccctttgcttcctcacttatgaggtcagcagttccctaccgtggtatattgcattactgtagactcataggtcatagaaccagaaataatgtactgaaaccatgagacaaaatgaacctcctctttttaagttgatttatttcaggtatttattgcacggatagaaaaataattaatgtctaaactacaaaataggcattaacgtaacttcaaattctatattaattgttatagttactttctgttgctgtgataaaacactgagaaaatcaacctgcagaggatggggtttattttatcttaaaacttccagagcacaatccatcactgagagaaaacaagacaggagctcaaggcaggaacgttgaggtgggaactgaagcagaaagaaggatcactgttcactgacttgctccttgtggcttcctcagcttaatcttttatacaatccaaaaccacctgcccaggactggtaccacacatactgggctagaactcctatatcaaccatcaatcaagaagataatcctgccgcgaccaaaaaccaaaaatctaaccatcgttctaacattcgagaaaccacttattgagtattagtgaaaagggcacttacttataatcttttactttcctcactttctgtacaaagacagattgttttcctatttcaaccataacaatatatcacaatatttgattgaaaaatcaatataagaatccagttatcttctattaaaacaattttggaacatacagaacaatggaatgctagctcttggttgttaaatatgtctattttgtggtgatatgttatttatgatttattaaagcttgtctgagggtacagaaaacaaagccagccacaagccagggagccaggtagtggttgcacacacctttaatcccaggatttaggagacagaaagatggatctctgttagttcaaggccacactgaacttcacgtaattgacccagtcctaaagagaaacagctcacacaaaggtgatctcagcatttgggatcacacacctttaaccctaggatttgagaagtataaaaggaagaaacaaagtcagtattacacaattagtctccagccacattgagggcaggattgcttcagcttgggtagatgtaagagcttggctgctttgcttctctgatattcaacttgaaccccaatatcttcactgggtttttattatttgtgctacaatttttcatcaagaaatgtcatttttatcaacagagtgtggagttttgtggcttaggagtttttgtgtgtcattgtttttttgtttttgtttgtttgtttatttgcttgtttttgttttgagacagggcctcactgttgtaatttaagaaaaacggtatgcattcgagagaaaaacgtcatgcattcgagagaaaaacgtcatgcaacatggttcaagaagattgtttttttttaaatttggaaaatggatcataaaaagggggaaagagaagaggagagaccagcctctagagacaggagcagcaggagaggggagaaatgaaagagggggagagagagggaagagggagggggtgaagcagacagaaagagggagggaaagagagagagaaggatgggaggtaggcaaggccctttttaaaggaaacagtgaatatacacaggtggtgctcttagtggctgcagctgagggcgtatcctgtcagaaccccaaggacaggccagtacagatgcctgaatactaacactcactgtgtagcctggctggcatggaactcatatgtagaccaggttggcctcaaacaggaagacattgcctgcctctgcttcctgtgtactaaattaaaggtatataccaccatgccaggctcccacactgaagacttttagttattttatttgcattaataacttttaatttcttagactttattcccagtatggcaaatatcagaaaagataagtcactgaaaaatccctagggtcatcagtaattcttcaatatgtgtgtaggatatatatgcatgtgtacatgcacattcacttataggggaacttgtgtgtgtacatacatgtagagaccagagaatgaggtcaagtgtcttccttgatcactctccattttgtatacagagaaaaagtttctcacttgaacccagagctccacaactcagcttctcaatctaacatgctttctctggagatcgtgtctccacttcccacatactgtgattacaggagggcttccatgcccaaccagcacttacatgagtactagggatctgaactccaatcctcacacttgctcagcaagcatttttgcttgctaaacatctccccagagtcctcaatttttcagggtatgagagaattttatgatcaaatgtttgagaactaatggattctatcaatgggttgtttgattcctaccttccagttaggtttgaccagtgtggaactcaagcaacagggaagaacgaggttttttataatttgggtggttgtatgccttcttctcttacagttaaaggcataggccttgcttccaaactctcctccaatttctactaagatctgttccatcagcctagcaggggaaggattttgctgttattccatggtggtcctgtcctcctatccacgttacatctatttttctggagctctctcttcatacttaggtcaattgctgccttccaacatcagccacctcatctccacatccctctaaatctaagatgctggttgctggtttccagtttttgtcagtccaccataatgtcactgcatgtaaagccttttggcattatcatgtcagaattcgtttttatacaataaagacagggatgtggtagcatgtacacatgtaattcagcataaagccacaactatttattcggtgcttacaggcaccaagtttaattatgctgagaactctgcacaatccttaagaaaatgaaaggtaaagaacaaacaaacttaactaataacataacaggatagctcaaaaaagctctgcagttcatcctgagactcggagctagatgcagcagctgcagttgagcctgtgtttccacctaaagagaataaactacagatgtgaccattcatttcctgagtattaattaatacttccattaggcagtgggtactgataagtagatacaaaacagaaaagaaaaggttcctcctctggaagaggttgggttccttcagggaaatcagaccaaaagggtagtaaacgtagctcctggaagaatgccaactgccaagtgaagcccacataaagcatagacaaggcacagaggaggattccagctgaaaagcagagggcttccagaaggaaatggcatctgaactgcacttgagtgatgggtagaatataatgacggagctgtcaaaggagcagaaagtaggctgaatgccctagggtctaggaagaaagaaagggaggccgggaaaagggagctatttattaccacttgtcattgtttggaatttttgctacttctattcacaggcagctaacatcagaacccagaaagggcagacccttgcccaggattgtctaccaggtcattctcttagctacagctgctccccagctacccgaaggcatgcctggtgctggagactgtcatggaaatcttaaaaagtttcccatccctgcctgcactcaacccttcagcttacagccccagctgtcatttcattcttcatgctcacctagtctcaaagaggcaaacagcaccgaactaactgtgcagttatcaccagactgtcagtgcagccaaggcctttgcagtcaccagcacgaagggtttaaaaagcttttcaaaaagtaaaaggggaaccaattagatttctaaacaggtgaacacttgctgccaagcctgatgacctgactcgttgagacccacatggtcaaaggaaagaactaattctgccagatcttcctaacttctccctaatgcacacagcacaacacacacccaataaacaacattcaaatcaatatataaatacataaatgcaaaagttaagaaaccttatgtgtgtgtctgagcctgtgcgtatacctgtgaataaatgagtcactctcctcagacaggatcagacattgggatgtgttcagtgagtgggagacagaggctgcccctcatagcctccgattaccctttgtcgtatacacagagcatctcacttcctcaaagactaatcactttttgtaaagagacgtgacattattttttttctgaagtgatcaaccatttataattaaagtaagaaaacagatgtttgaaagtctggaccaaaaactgtggctagttaataataaagctgaaagaatcctccgaatcccctctcatttctgtgattcttctagctaactcatacttcccttcaactctgtaaataaaatagaagcatcaacagtaggagaaatcctactacgacatttaaatgggcataggtcttacttaagaaatcctcaaattgatacctttcgctttgtcgacttgtcatgctgctgacattagacacttagttttgtttattgataactagttatattacaaataaaccttacaaattacctttcgaaggcacatgaaagacatccaaggcaataggagagcttgacagaaaggaaataaaatcaagcaggcaagaggctgacagaaaatacattctatgaagcaccatgtgtgccatgggaaagtgatgcagctgccctcgagttttgaaacaggcagtagcatttctagttcaccgtataatcctacttctcagcaataaaatcaaactgcttgtcaggaagataatcaataacttttcacagagaagccacaggtcccatatgggccaggcatcagcttctaataagctaggccctcagcacctccatgactcttttcgtatttcatctgctgtttacactggggctagctcatgactcctaacctgtgcatgaacacaaatccctgaggaaacttgaagattttgcaaggccttcagaaacagtgcccataaatttacgactggaacaattttcccagtcaccaatgttaaaatatgtgtagaaactgctgtggatatatatatatatatatatatatatatatatatatatatatatatccacatatttcagttgaacttgataaatgatttacagaattttattttctcattttatagttgacaatagatactaaaattgttgtcagtgattgagaatggagaagcagactacctatgagtatgtaaaagaaatgcatctccaaaggcagagctagccattgaagccactgacatggttattttaaatccttattttgcagaatagacacatgtgtatctagaagacttgaagactggacattcttctggttgggatgccctcctcttgctacataaatatgaaactgtataccataacaagcaggtggcctagaagaacagttgatgccatcttatgatgtatgagaagcctggcataggtctatttctcactgctgttctagagagagatttaggcagttcatagaaataaacttgcacttcctccccctccccccacatagtaaaaacaattcatattccagaaggagccaaacagcattgtcaagattgacttaaccaagaatatccaaatgatttcaccactattttaaaatgccattcatggaaaaccgaacttcaggttatgttatttcctcccagtcctttcattaaaaaaaatgtcaagaccactgaaggaggccacttgctacatgaaatcattaaataaaacttatttaaagcaagttaaactctgcaaagtcatttcgttagtgtctgtttttctttttattatttttatttttttataaacttctaagatttatttttttattttttatttttggagtttagcatttgtttattttattggcctgagtattatgccattaaaatagtcaacatttacattggctttttagtgtcttagttatagtctggactcaaattgacctttcggtcaattaatatgataagggaattttaaagaagcactgtggatgcttaaattagggttttctctgtcttataaatgtgcaatgcgtttttcaacttcattttatatttgacttaatgtatttttttatttttatttgaattagaaacaggattgttttacatgacaatcccagttccctttttcctcctgtcctcccttaccaccacccccccacaactaaaaccctatcaatcacacatccttcctgctccccctggctggtgaggccttccatagggtgtcatcagagtccattgtatcctctgggatagggtctaggcccacccccgtgtgtcttggctcagggagtattcctctatgtggaatgggcttccaaagtccacacctatgctagggataagtactgaacttctacaggaggtcccatagatttccgaggtttcctcacagaaacccatgttcctggggtctagatctaggtcatgctggtatcctagctatcagtctggggagcaagagttccccgatgttcaggtcagctctttctgtgggtttcaccagcctggtctggacccctttgctcttcacttgtctttctctgcatctgggttccagttcagttctgtgattagttgtgggtgtctgcttctacttccaccagctgctggatgagggctatcaggtggcatataagtcagtcatcaatctcattatcaggggagggcatttaaggtagcctattctctgctgcttagataattagctggtgtcatctttgtagatttccagacatttccctagtgcctgattactctgtaaaccaaaaatgtctccctctattatggtatcttcattcttgttatcatctattctacccctgactcaagctttctgctccctcatgtcctctgcatcccttcccttctccccttctcattctcctagctccctcccccctcttcctgtgctccaaatttgctcaggagatcttgaccctttccccttctccaggggaccatgtatgtaacgttcacaattccttctcactccagtcctccggctccttctcctaccccacccctatccactcctcagagagagtgaaacctcccataggaatcaacaaagtctgtcaactcacttgatgaaggacaaatgccctccccctgttctaggctgagcaaattatctctccatagagaatgagctccaaaaagttagttcatgcactaaggataaatgctggttccactgccagtggccccacaactgcccaactagaaaaaaaaaaaaaaacatcctgaatgaggtaactcagacccagaaagacaaataccggaggtactcactcataagtggatattagacatagagcaaaggagaaccagcctacagtccacaaccccaaagaagccaagaaataaggaggaccctaggagagacatacatagatatccccccaaggggaaataaacaagatctcctatgtaaatcaggagcatggggggatagtaggggaatagtgaggggagaaggggaggcagagaacaagaagaatcaggaaggtcaagttgggagaaggacagagcagagagggagagcaaggaaagagatatcatgatagagggagccatgatggggttagtgagaaacctggcactagagaaattcctaggaatccataaggatgactccagttaagaatcattggtgtctttgagtttcagtggctgcagtgaaatgccatagccaaatagcaagttggggaagaaagggtttattcagcttacacttccacatggatgttcatcaccaaaggaagtcaggacagagattcaagcagggcaggaatgtggaggcaggagctgatgcagaggccattgaggagtgctacttactggcttgcttcccttggctcattcagctggctttcttatcaaaaccaagactaccagcctagagatggcaccacccacaatgggctgcaccctcccccattggtaactaattaaggaaatgccttacagctggatcttgtggaggcattttctcaatcaagtaggtaactctagtttgtatatcaaattgacagatgactagccagcacagttggggtgtacccaatcggtaatctttcccttctgtaataattatacaacatgtcaaattgtcttctgagatcattagattgaaaacataccaactttatataaaagaagacctatcccaatgtgttatgaaatgataagaaactaattaaaatgaagggcaatcaggacacaggcaggctttagctcaatggaaaagcttaactctttgaagaagggtgcctccaagtcactctgcaacttgggaaatgtcaggattcaaatttaatgtagacatgataattgaatgcaagatacaaggggaaagtaaggtattttcaaataacttgaggtatcaattgtacacaaacccaagattaatgaaagatcagtaaattaataacaagtagtttccaattatcctggatcgatctgtgcataaatttgccctatctaataggaggaacgcagtcttgctttctcctcatctaaaatactagattgaggaactcagacttctacctggttaagaaatgaaccagccaatagtgtgaaggcagtgtcttgtaagtgacagtgttcaggcaggagctaaaatttttaccggctctgggtgaagatccagcccattgcattttttaagtttgaatacgtccacaagaaacatggccagccattctgcatgtgccccaaaagaaccaaggcagttcagacaatattccctgagtgatttatttaatttgagagttgtgaccctgttgataaaaaaataaaataaacagataagctgagagtaagtaacttgtccttaaagtgcatcagaactgtgaagcacaattttcagctcctcacctatagtcagtagccacatttctatcacaagtttcattccccaagatttacttccctgtttcaaaactatagcagcattcctaggagataccaactgatataatgagtctatttttgcaaagtagaaaatatcaagggttaatgaaaacataaagaaaattgaaatctcatacaatgcttttgggaatgcaaaatagcacaaatattatagaatacagttttgtgagctctagaaggttaagcatagaattaaatatgatccagcaattctgcttctgggtgtatgcccaaaagaattaaaagcacgaattacaacacttacacatccacaaatattcacaataaccaaaaggaaataactgaagtggccatcaacaaatgaatgcctatactaactgtagcacacacttgcaatgtgacattattcagctatacaaaaggaacagcatgctgagacttccttcattatgaatgttccttggaaacatcatgctatgtggaataagccagacacaaaagggcaaacactgcgagattctagtcttatgaggttcctagaataggaaacttcttggagacagaaagtaaaatgtaccaggaactgagggaaagagaagaaaacaagttgttatcgttaatgggtctctgttcagaatgatgaaaaagttctggaaacagaaggtgataacagttttaaaagattctgtgaatgaatgtactgaatgctactgaagtgtatacataaaattgctagagtaataaattttgttatgtgtattttatcacatcctcaaaattcaacccgagaaaccactactccttctcagttctctctacacacagatgttcacgcattcacaccatgattctatgaccttttacttcgcgcatccctaagcttctgtacccatcccatgaacccctgggactgtctcatttgggcatgctggcatgtgcttaggagaaaattttgtgattcttctcatgtaatggtttcagaacattgagattggacttaatagctataacatttttggaccaatggattgaattgcaaattggcaaaaatgatgtgggtttaatgtgggtcaaattctattacaagagtttaaggatacaagaatataaaccagattgaatcatttaaatctctaaagcaattgaacattgttgctggaaaaactggggatttgaaaaaatgagaacaagggtctttttctacacatttcctcgacttcctgaccacccccatccataagaaaaaaatgactctacaggaacaggtatgtatcaattaataaaagctccaaaaattgagtacagcctgagaaagcaggcctttgatcatatcaggaagtattggtcatgaatgcctagacagaatggaaaattccctgaagacattgagtcctctggtgtgacacatttcctccttcagactgatggctgccccattacatccttaaatagctatgtcccccttgacttccctacttctccattgcacatctgggtaagaattcagaaacagtagcagaaaagcatggataagtatgactgaactacttgttactgtttcttccttgccatggcaaaaggtactttctgatgggacactagagaagagcatggtagctcagtgtggtgtgcaacatcctgcctaggatgaaagtatttgccatccatatgtcttctctctttctaccactttccttagccatgtgggagcagagctatgaacaaccctactccctgcctcacaggttctatgttgtgttacttgctaacagcttttctcactggttaggaacatatttattattcatatcaacaccagcatgaactgcaatgatccagttcagcgactgactggaactagatctgtcactaagcatgaggagtacgactctttcattttacaaataggaaactgaggtaacgtgagctgaaaagaactgccttgggtcattcgtgacagacaggtaattcactctcagatgtccctgttcttggcttgggtgactgttcctcaagtttagaacattcttcaattgtagacaagagaaacctcacacttcggctaaggatgtgtggctttagtggcttgacttaatttgtataagggctctaagtagactggaaatatgttttaatctctttgagctattaactctgagtcatcactcagaatagtggcctccatttaaatggttgatgccaggacaatcattacacatttgaaacttaaaattttattggacctacgatgtattggattttacttacaacagggaaaatgcaaattgttccaaagtgacagttttctctcctttgtgactggaatttgatagtgccccaagaaattccaaagatggcaaattccaaagcttgactactgctgcagattcatctccctgcttgtttgtagaaatctagtaaaatgtgactcagcagagtgtgtggacagttagtctgttctgttatttgcttctcatcccaatgaacaaatattttaaaacacacacttacaagcagcttttggtaaaaatcattgattcctcccttgggtccacaaagtaatttaaaagctctgacatccctgctttcatccagtatctgccccttcctttggctgaagatacaaaagtaagacacagtccttaatgtccctcttgagtcaatgtggagtcccagaacagtaatgccctcaggaccagccaattccaagtgagggcaattagccaggaggacaaggatgcccctggaacagaagggataattcttgtgtgaaacaggttattattcttctcaaacaaccacagcaaatatgtttccaagagttttcccaacaagtagagaggctctaggttcctggagacttaatcaaagaattgcagtagctggtactagcagttggcagtgaacagttttattcaaaagagaaaatcacagtagcaggcctgggagtgatgaggttgagcaggagatggttcaagagttccaaatcccttttgggtattctcacttatttataagactagacagagagagaggctccatccctagggaaaggaattggatagattcttaccctgattgagggaaggattttcacacaactttgaacaatctttgactgtaccagatctacaggcagtacctacatctcattggcctaaacatatgtatgtaccacaacacatttgcatgagatggtaaaaaaggacttgtctctgaccggtcattcaattacaggctgtccgtcactgtacttgcacccagtaccaaattcatccagcattccttccccagccaggctgtgcctgactctgattacccacatgaggggatatgttaggtgttgacctactaggaagaaggtggtattccatcctctccaatgagcagtgccccaagttgcccgactataatctgtttgcctatatcagaaaggtcttcttcagagactatgatcagccagaccaggactgcttggttttgcagacattttcctctgctccacctttctgctaaacctacagtatcccaaagatgggattggagtcattggactcctttattgtgcctactcctaatgtatcctttctctacctctatccatcatttgtctcttcaattggcattttgggaacaaacttggtaccacaaaggtggagcttttagctaacaagggggtctcacgtgaaatcaacatgtgcatatttcctggcttttgcttcacctttcccataaaattataacaactacagagaaggcagagaggaaactaggcattgtgttctccctagtttggccaaactataaatatatccaatgtccttcatcaattttggtctcctctcagtcttttcaaatagagatggaatttaagtacttaattccttggaacaactgcaccaagcctaccagaagagaaacccatggctcactaatgcccgtggttggaatggagaaaactcccagccaccgggagttttagctggtttcctggtccttaggtgttcactgtctgtaaatgcatactaatgagcttgtaaaggaagggggctttttagattgtgacctggtaattttacgcaaagcacactagtgtttagttttatgacttggagagtttgtggtgaactcacaatctggaacttggtttgttttgtactcttggcaccaatttgtaacgctgaatttgaactgcctgtcagcttaaagtctcagctgagtcattggctgaatggctgtttgcttatgtgacctaaaagttcaggtgtttggtggagtgttcacattgcttgtttcctatagaaactgtttagcattattttgatcttctctgtaatgtttatctccaggtttggagcttgaaaccatttggatttgtcctggctcaccatgcagtaccaattttgtattgactacatttatgagataaattatttctactctctgaacacagataaccacttggatgctgctgttgctgtgggataaaaatcaagaatctagtgcctggtttcttgttaagcccctaacagctccttctatcaaggtatcgctttccttgctctccttctctgttcttcccccaactcaaactttctgatccttcatgttctgttctcccttccccttctcccctcctttttctcctacttccctcccttccttcatgcccccaatttactcaggtgatcatgtccatttctccttcttagtgtatccatgtatgtctctcttaggatccttgtttcctagcttctctggggttgtggattgtagtctagttatcctttgttctattccaatatccacttatgactgagtacatgccatatttgtctttctgggattgggttacctgtctcaggaggtttcttctagttccatccatttgtctaagaatttcaagatgtcattgttttttccactgagtagtaatccattgtgtaaatgtaccacattttctttattcatttttcggttgaagggcacctaggttgcttccaggttctggctattacaaataatgctgctatgaacatagttgaacagatgcccttgtggtatgaatgtgcatcctttgtgtatatgcctaagagtggaattgctgggtcctggggtaaatcgattcccattttcctaagaagccaccatactgatttccaaagtggttgtacaaatttgcatttcccaccaacaatggaagagtgttcccctttctccacatactctccagcacaagctgtcattggtgtttcttattttaaccattgtgacaggtgtcaaatggaatttcagagttattttgacttgcatttccctgatggcaaaggatgttgagcaattcctttaaggcctttagccatttgagattcatcttttgagaaatttctatttagatatgtaccccatttttaattgtattatttgtgttttgatgactagcttcttgagttctttgcatgtttttgagatcagccctctgtcagatgtggaattgttgaagatcttttcccattctgttggctgtcattttgtcttattgactgtgtcctttgccttacagaagcatctcagtttaggaggtcccataatagacaaatgctccttatactgacttattctgggtgactctacatgaccaaggttttaacagaggagccagggttgtctggcttataattaggagcagtgtaataggggaaagcatcagagtacacgtcatcctgagttgaagaactctgctagtgacttgtccagaggtgcacataagagtttgctactgatactttgcattgatctgtatcccttagtatttggacttctgagacatgtgagaaagaggacacccaaccagtaagagagaatcctcattaagtggcacacattcctaacccaaagcacattcctaatgttaattcttatgttagcaaccaagacaaaccctgacctaaaactcaacttactccagaatgcctaaaaattactagctgatgcacttatgaatcacaccatttttatttttaatacatgttttatcagtttaacattatttaaattaatatttgtgccatgcctaatttaaaactattttaaaactttcaagtgttgttatctatccccatatcatttttaatgctccttaaaaaatcatttgctcaagatctttatctcagccaggcctacattgtaaaatggttaggatctggtgcttctaaatattaattctaggaagaagagatgaaaagaaatcccttgctgtgtgtttgtaagataggcagcaacattaattataagtttaaaataaaggcagatggtcttaattggttgtaaatataatttagatttaactctctatccaaagacttgatgattctatgctgcctctgtaactgaaatgctcttatcttcttaaagcctcctaaaatggcatattggttctgtggaatatattccataaagcatgaaaatgctttgaatatgctgtatttggatgcagcaattagcatctgaatttagtaaaagcacaatttgtttgtttaaaaaaatttcactgagtcataacataaaaggtttgctgagttatgaagttttgtatttacagagatgttggtaaggattttttccaaaatagattctagaaagaaaacatcgtatttattttttgagtagtcaaggtcagtggaaaattagagagcataagaatgcttcatgtctgtcaaaatatgacatattaaaatacattcataagatggttgatatgggttttttcccatgatgctcacatatatgtctgcaactgataaacacaaaatttatataaggctctgatatacacaaagtgatggtgatgtgtgtttatctgagatttgtttggtaaatttattttcataattgaattatgggcaacgccatccactatatagagtagcaaccaggacctaggtcaatttttatactactctgtgtgcaacagctgaagtgactgttagcaaatcttaccaagaaattgttgacctgagttcaactcctgggttccacatggtaaaattagagaaccgattctggcatgtgccctctgaacttcagaggcatttttccctccctccctccctttctctcttgctccttgtccttgtctctctctgtctctccccccacacacacacacacacaatgaataaaagtaaaaaatattactttatttttaaaaaatcacataaaggaggctggaaagatcatctgtcagtagttgactatggcttagttcccagcacctatgtggtgactgacaatcatctgaaactgcagtttccagttggtcagtgtcctcttctggcatccaccacaccaggcatgcatacgatacacatacacacatgcaggccaaatgaacataaaataaatcatttttttaatttaagaaacatgtaaaagctacaaggactgtaaaatccaaaccagactgctgttcaggacaactgttaaaagtaaggcatttattgctgccatagacagacagacagacaagagcatgacaggggctctgaggtaagttcaggccacttgggcatcagagatagatggcatggcagaggctctgagtgaaatctagggttctgtgctagaagtgaggaatctcttatagtcctctgagaatgagggtgggaagcttcactgtataagcctgcctggttctccaattcccagaaggtgacagggaaacaggcaaaagcaaggaatatgccccccaatatttcttttgatacagagtatttccccaggtaagaaatctgagcactcgaaactccattatctggagagtctacacctccctcagtagagtgtctctgatgcctaggagagaggaagggctactgtaggtatttgacttgagcagcatcttatttggaatctaacgttacatttttacagactctacctgtatgtggagacacctttttacttttgacctttgtcacatataaaatatgtacatacataccttctcaatgtatgttaagacaggctacttttgtgattgggaaaggctttcactctacatccatccattactaaaagctgtcataatattaaatatttggatatctaagttggtacgtgtaacacgacgagttttaataggcattaataataaaagcctgaagtcagatattggggtaaaagctgaaagatcagagagatgaaggaagaagccacagccacaccttaccttgccaacttcccagctgaaaaaagattgagttcctgtctacttccacctttattcctctctccacccagccacctcacttcctgtcttggcccagccatcttatttcctgtctgtctgttagctagtggaaagctccaccctctgatcttcagacacacttgatttgtacaaacgagatatcaccacaggtgtgtgtgcacattataaaatgatgacaaaagcagtattgttacagggagtgcttagattcataaacacattccatcataaaacaaatcagaaagtgaattaatgaagtatatttatttatagtctaacaaaaccagggcacaaaaaataataatcatgaaacaggctcatattttctttttgcttttttcacagtcctgtttcaactttgtagaaaaacatgaaagaatatccaaggtataagcatgtatttagtttccagtattgtgtgaaatttcttccgtggaggcaagaccctcctcgggttgaccctgggcttcagtctttccattccccaaacatgacaggtccactgtttccatattaaacatggtgggtccactatttccatattctgagtggaagaaaagtagacaaggagaataactcctgtcctgccacaggacaggtacactgtgttcacaaaaggcaattggatcattagtctcaacattatgtttgtgacagaaaaaaatagtttcttttctcttttgagacagggtctctccatttgccctggctatactggaactcactgtgtagaccaggctggcctcgaactcacaaagatctgtctgtcactgcctcctgagtgctgggattaaaggtgtgtgctaccactcctgacctagaaaatgttgtgttgtgtgtaacataatgaattctctgtaaacaattttctagcagttacaacaatgtgaaaatgttgttagcaattctgtccatttttatgatttcatatatagttttcaaagaaattattgtattattttatacttatttttgagattataattacattcctcccatccctgtcctctctccaaaccttcccacatactcctccggttctccttcagattcaaggtgcttgtttcattagttgttattgtacatatgtatgtctctgtgtaagtacatgcacacacatatatgtttatatatacatatatgtttatatatttttctatatacatttatagtccaaaacacaacctgtccagtccacatataatattacttctatgtaaattttcagggctgatcattttgtaatggacaacaaattggagtgctcttccttggggaggaacccctctcctgctcccagctttcttcagcagcctatagttctttctgcaaggctgaagcctcatgggcctttccccatctgctttagcatgtacattggttttgcctttgttcagctcacatttggacagccatgttagtgagactttatgattgtagcttctgataatgacatacaatgattatataagtatcatgaataatttttctgggatctagatataaatttgcatgatggctgtaaaaagtagatttagtaagaaaggatttctatgatatcagattgaccataaccaaaatatgtgtgcaaggtattttatatccaaagatgttagactttcatagaacacagaactacatttagtaacatttacaaaatattaactttaaaaggtctgatgtcttctacttcttattatttttgtcaggcttataacagaatcagggatcattaaaatttctgtttacttttaaatcctttaatgggcgttttatagctccactaaatagagctatcactcctatgataaacatgaatcactaggtggtaagtattttaaatattatgggatgtttgaaaatgtgaatttatctaaaaaattccctaaggtcaaattttaatgctctcatataaaactagaagcagaaagcttccttaaaaataatgctcttaataatatttacaaaataaattggcttatagaacaagattttatcttttattaagatcattgcttatgtttctgctgactttgtcaaactttagactacttaaaaaactgagtcttagagaagctacacccataaaacaacaacaatatggctgaaacctgaacaaggacaccgggtgatgtgttaaagtggatgaaggaaattacaaataattttgtaattatttgtaattataagagagggagaattagtctttcctggagatcaagctcttagtaactatctaattctaagtgacaaacattcatatatatatatatatatatatatatatatatatatatatataatatatatatatattccaccctgtcagagaagctagtaaacaaggaggactctaagagagacatacatggtcccctgcagaaagggaaagggtcaagatcccctgagcaaattgggagcacaggaagagggggagggagctaggagaatgagaaggggagaagaggagggatgcagaggacatgagggagcagaaaggttgagtcaggggaagaatagaagataacaagaatggagataccataatagagtgagacattttaggtttgggcactagggaaatgtctggaaatctacaaagatgacaccagctaacaatctaagcaacagaggagaggctaccttaaatgccctcccctgataatgagattgatgactgacttatatgccacccaatagccctcatccagcagctggtggaagtagaagcagacacctacaactaatcactgaactgaactggaacccagatgcagagaaggacaagtgaagagcaaaggattccagaccaggctagtgaaacccacagaaacagctgacctgaacatcggggaactcttgctccccagactgagagctgggatactaatgtgggactgatccagaccccaggaacatgggtttcagtgaggaaaccttggaaatctatgggacctcctgtagaagttcagtacttatccctagcataggtgtggactttggaagcccattccacatagaggaataccccctgagcctagacacacgggggtgggcctaggccctatcccaaaggatacgatagactctgatgacatcctctggaaggcctcaccatccagggggaacagaaaggatatgtgataggtagagttttagttgtagggggggtggtaggggaggacgggggtggggggagagaagggaactgggattgttatgtaaaacaatcctttttctaattcaaatttttaaaaatctgaaaaaacagtagtatatctcaatagacctgacaggatgttgacaagatgttactaatcacagttattatcctgcattcacctgaaataacttgaatggtgtcaattgccagactttttgcagaattctaacagtatctcttctaagtcattgtcatgacacttttgatccatctctgaacaatgaccaaaaaatccacagaaatcgactctagcaagtacttttgatcagactagtattaaaatatttgttcttattggttgtgtttttgtattttccttaaaaaaatttatcactgttgtctattgttaggctgcaaaataaccgaagcagtagagtagtattttgatttgctagcacattattcagagaacagaaagaattaaattaggctaagctttcccagggtctgttcattttttgatctatttttaaaagttttaattggatacacatatgtaggggataccctaaccatgcccacttgggactggttacagttaatgctagccgtgcccgcttgcggctggagacaggtgtccctgactaagcaggcatggtcaggggacttgagaaaggtttaagagtgaggcacacgcacatggggtcccttctacttaccttgctccctgccgactggccaggctgatctgagtgagtagcagtttcctcaataaacaacctttatatctagatctgactctgtattgccatttccactttacacatatgtgtctttagggctagatatgtgtacatgaatgcaggtgccattggagccagaatatggaatcagaccacaggggctggagttacaggcagttatgaggcccctgatatgggtgctcggaactgggccagggtccactagaggagcagtaggccctcttccttgctgagccattttagttatatagatctggtggaaagaaggctttattagcattgattgctagtcatctgtcacttcctgtctgacatggagtcagattaaaccaagaagagcagagttcttcccggctgtgagggacaaaacaaatgaaaccaaaccacaagatgattaatgaggaatatctttggagaaaactgttcaaagacaggaaagttttcagacaagatgttgtcagaatcaaataaagtcattcttgaagtgccagccattgcctgtaatcctagcacttgaaaggccaatgcaggattgacagttagcaaggctcggtctcaaagctaataacaaaacttttgttacttatagcttctcctctaaaagtaactaaagagaaagggttatgaatttccttttcttttttgtgtgtagtatgcaagtatgtatataagtacatgattgcctgcatatgggcatgtttgggggtatgtgtacatgtgtgtaggagtgtccatatggaagccctagaacttactcgatctcataatcaaacccagagctctctgatatgtctactattgttagccagcttttgagggggaattccctgtcttcatcttctatgatgagaattacaggtgggcctacctagtatatatgtgagttttagagacctggacttcagtcttcatcctggcatgtcaggctcttcagccaccaagccttcctcaagcaatatttcttatgcaaagttacctgacattaactgaatagcttttaacttgtttattgctttctgtttgcaaaagcagtttcagtaatttttatacatgtccagcaaatcacccaaaatacctcaagattgaggtctgaaaataaataggtggaaactttcctaaccccaacaggagaacagatgttctagagacccaggggcacttcccttccactatcaaactatttaaacaatagatttcaaagagttagaatttccccaaaaaatctcatgatggaggaagaggaagcctgaatccttggcactaatcattacatggaagggggagcttgattttcgagaaaggattccatacagttctgagagtttaattcaacatatgtgcactacttagcctttgtttcatctttgcacaaagttgtagcactgctgcataaaaggagacaaactaggtgtcttcctcctcctagagtggaaaaccataaataaatctagtttccttaccaatttaatactcctaattttaaaatgcagaagaattattcaatgaagttagtggatttaagtgttctgacaacaatgccattctagaaatgggactgggggtgaaattgaaggagggaaagggagaaacttgtgatatcagtcagtgatgtgaaggaactattggagagtcaacacaggtaagtagctacagacctcatcacaaggttcttttacaattgacatttcttggtctttatacccatgtaagcaagtaaatccataagtaggtatttaagaagcacttgctataggcagaattctcttccagggcttcagaaaagtaatgattcaaacacaaagcctctgaccatgtagagcttacattttagtagaatgttagatgagagaagcaaataacaaacacataaagggagacatataaagttaatttcagagagcaatagatggtatcaaacaataatatacagtctggctagcagcaagaaggtaacaaaataggctgaagagggtctttacaggacttttgaggtggtaaggtcacaactttcttagttgaatacaataaaaatccaagttatatttaagacagcagagaatttatcaacccaacaatgtagatacaatactaatataaaattgggattaaatgagtaattcaggatccaggtttatgggaccttacagatggcaaattggacccagaaaaggctacattctaccttgcctagcatctaagtttggttgacttagactcgttttcccagaaacctgccaacttccagagaacaatcttagctagttacaacaaatcattcccaagccagcatgacgtctgtggggaggaaagagcatgttataaacagaagagaatagttaagctctacagctcatggctactacatccaagccttgacttcccagctgattcaaagtaccctgtactgacactaaattcaggtatgcatttatcaagtgccaggacttgtacacaagaagaaacacacacaccgtttccagactgattgaaccacatgatttttgtgtctaatcccaagttttatcatctttgccaagtaacaagtttaattctcccaatatgaccaacaaaaaattatgggagagtgcataatatctgcattaaaaatcccatttgggaagcacagaagaccagctccctctggcatttatcatattcagcatattgaagaaccagaaggctaagacattgcatccctggtccataaagaagtcctcagacaagctgattttcttgactcttgatgcctgagcatagacactgataagaaagttgtgggtcacagcctgtatcccaagctaggtacagacactcatcctcaataaggcaataaaaatccaaattagtagtggaaagcttttttaaaaaaaagatgtattcaatgtggtcacattagaaagggggaaaagttttagtgactcccctaaatctgaattaaaattaaggtttaaaaaaaggctggggataggcacacataaacagaaacagttagcatatagtcctgcccaccactgactcatcattgtctggaattcagtctcatcctgtaaggtaggctaaagagttgttatgaattttgtgaaatctcttttagggagacaagtttcccctctggtgcattttttcctctgctgggatgagatttctggagaaaactccattactttggagtccattgttttgatagtctgacagtcagattgaaatgcataagatattctaaaatatctttcttctaaaccagttacctgctattggcctctcttgatagccctgaagcagatttaaactctgcttacaaagtgtaagcaaaccgtatctgcttattgttggtaaaggtccatagggtcgaaaattataggacatttttttctggaatcaagattcttgctcaatataatttccttactgttctataatatttttgtactgtctactgcttaagcacaaacatcagaaatgttggcaaaacaagtttctcaaaattgacccagtaacaaaatctattcattaggactctgggttttagtaatcatatcaacatgaaaactgtggatatgctgtcttttgcccagactttaggtgatctccctaaaaagtaaataaacttaaattactaacttagccagatctaattcagtagcaggcattgggtgggcagtattttggtattctagtggcagcttaattgggctgaaccctatgggagatcataaaggcaaaacagttgccagagtacagatcctaaaagtttgactttcaactagctcagaatggctttgccatcagattcttcctcagaaggataagatggctgttagtagtccaaaatctaaattcccccctcaataacctcatgagaaagaagaatttgtttaggaagcagctatgatacaaaatcctattcacatttctttggtagagatcagcaaataagtggggaatcagagtgagtcagcatgagaaagactgagacaaatttcttcagcaattactctagccaccattgcccatcagtctgacaccagtctacactagacaagatactgttgtgttctataattagagacaattgagtgttactgaagtaagatgaatcctttcctgttttcagtgagatactgaggaccaaagcaaagcctaatctcccattacaacttctcattcattcaccaatttcctgaaacaaaaatagttattgtgtggcttatttcccaagtatggagttaggtacagactatatgtcagtgataaagcatagccatggtctttcccttcatagatgaggagtagtgatttaaaggaagactcccacaaagtcaaacaagtcacacactaagtaatgtagttgattctataaaaagacagccatgtaattattctagaggtaaaagttgaatgcaagtattcagtgaagacatgtataaagaaacatgtgaactaataactacagtattagtccagactgaactctagttagaattttcaaaaactcatttaagagtaagagcactacacagaaagacaattggaaaattctgagactgttatcttcccatatctgattaatagcatcattttcactaagtgtattcagagaagaacaaaacactctagaatatctctttccacttgtctctagagttttcctgagaggcatatttttattatccctaaagtcagaagatgtacaaatagaaaaatggtacagtttaagagtcagaggaaataaggaagcaaaccatcatttgcaacactgccctatctgcctctccgtgccatgattcctctacaccatgcagtggccttaaagtctgaaaacagctgataggcaatgacacctggcatgttccctagaaatagttggccttgcctcaaatgtaacttcccatgaagtagcttactgcccctcagatcagctgacctgctttagaattctgtcctctcccatgtctctttggtggatactaaattaactgttactgagtttgttaaagtcactagggccatgcaacaaaaataaatagttgtgcatgactaaaatgaataatctattatcagatacatttgcataattaagcttgctccagaaaattggcagagcacaaactggcaaagtgacattgcataatatcgaccatgaagccctggaatgtgattctcgcagaacacaatgaagtcagaactctgtgtgtacagattagataatgcatcagctcagtggctgaggacaaactgcatgcttagaatttgttaaatgttgtttcttctttctgaacagaataataagacttcagaccgggacagtggctagaggcagtacactctgacagcaaaatgccatgctgactgtcagaaaatatttcatttctgataggttttgtagcctctggctagacacaagactatgctgtgtataatttcttcactgcttaaatagtctaaaagtggttcccttacccacctaatggattataaaaagcaccgagaaagaaaacatcctactgtgagaatgtaataagccaccagatgcccacttcatgactctagatagccacaggcttgctttatctgtgctctatgggcattcatctagaggtggagaagttgtcctctgatttttccctatgtctgtttctcacatcacaaagaaacaacaaagcagttcagaaacctggggctccagttctttgtttcttgtggaagagtttccaagaagcaagatggcagaaaagtactgggactctttataagtatgtgcctaggtaagcaggtgtgatagtttgaatgtaattggaccccataatctcacagagagtcgcactattatgaggtgtggctttgttggagtgggtgtggccttgttggatgaagtgtgtctctgagatttcctaagctcataataccacgacatgtgttggttgactttctgttgcctgcaagatgtaagactttcggatactaaccagtaccatatctgcctgcatgcagccatgctccctacatgatgataatggtctgaacctctgaaccaagccaagccaacccaattaaatgttttctttataagagttgttgtggtcatggtgtctcttcacagcaataaaaaacataactaagacagtaggaaagtcagaattacagtatgttagtatcaaaggaaaaaactacctgtgcaaagaaaacccacaatttctatatttcctttttcaactggagcctttccatgacacccacaggagaaagaggctgtcggccaggttttatattaccagtgttcctgtttgattgtgtgaggagacttttctactcagatgtcagtgtgatctgtgacatttctcgcctatcagttacatgggaaactagaactaatgtcattttcttttcctgtctcatgcttcctactgaagctgccctctaggtcaaaaaagataactttcttagatgagaatctgctcttttatacagaaacactaatttaaataacatcagttaccaatgttatatggtgttcacttatttcttatttaagtggcaccattttattcatggtggttcactaaataagcctcaaactggtaaaaataaaataaaaagaatgaaagaaaagaaaagaaaaataagaaaggaaaagtggcttcatgtgttatatggaaaggatattttcctcagttatgattaaattcagtatttcaaatctaataagaaatcaggatgacaatgacagtatgggttctgctcaggccttggtgaggcagcatgggggaagggatgacagtctggaacctaagtgctgccccacatctgtccagtctttcagaagaagcctgtgtccctgagagaggactgtatctgaaggggatcttcctcagctcccagccacaaacaggaacttataaaggtgaccagcagccaggcgtcattggcacacacctttaatcccagaactcgggaggcagaggcaggcatatctctgtgggttcgaggccagcctggtctacagagcgagtgccaggataggctccaaagctacacagagaaaccctgtctaacaaaagaaataacgggaaaaaaagaaagaaaaaaaggtgaccagcaaaaagtaaataagacagggaaaatgagttagaggaaacagaggtgaacatgagaatgacagaagaaaagagacaaaccatgatgggcttcgctgttgggcctcttctacccgccatggggcaaagggaagaggaagaaaaggaaagttcctgcaaaggaagatagatcaggacagtataaagattgttgtgatggactaaatggaggcactgtccccggcagtatgctacgtggtaggaatgctggttattgattctacttgcaaagactcttaggtacatgtgctacaagacaaatcccttggactatgtcattcatcaagaatcacagcacatctgaaatattgagctatgtcataagcatggaaagaaaaagagtgaaccaataagagataatacttcaaaagatacagttaaaaacataggttttcatctctagagagcagacactggtcatagccagcatcatgactatttttaaaggcattgtagtagactggcagcctgggtaatggggtgacaggaactggctttttggagcccatttcctatggagggataccttgctcagccttgacgcacatggtcgtgcctcaacttggtatactagactttgttgacttctccaagggaggccttatcagctctgaggagtggatggagggtgggatggagggaggtggggaggcagaagaaggggagggaggggtaaccagggttggtatgtaaaatgcaaaaaaaaaaaaactaaattaaaaaaaaagtagtgacaggattacatctgaacttgaaatgaaaaactctaaggaaacaatggaagatgttcactggatgttttctccaacattaaagttgacattcatgaatgtaaataaatggaagagattgggcctgaagaaaatctgaaagacttataaacacaatgaaatattcctgttgtaaaacttgtttggaaaagcccagtacaaatgatgagaatcagctactgaagatacatgatactaagagaataaaaatgagtcagagctatgtaggctggaaaaggtacaatgtgttaggaagtcatagacaagagcgtgtcatgcataaggtgactacaaggtgtgagagtgaacacaactcagagctaacaggggtgtgcctgagatttttctaaacctattaatgtgtcagacaccaattaagaaacaagactggcatcagtggccaggaaaaaatgttttattgatgatattaataataatgtgtttataacataaagttcaggtcaccgataagcaaattactaattatgaacaagatgttaaatgtgtagcaaccttgattccctatggaattcttaggactatataaaacaggttcctcctttgacatcaataaatctgagtatgagtgacctgttgacttgcaggtttctttaccatgttcacagaagatattggtttgtaattaggggtctttttattcaactcatgcctattgcccagctcttaaattccaccaagcatctgcaatgtagacaaattctccttctctatcctggtaactttcagttcctatcctattttaccacatagatacatatccacaccatagcttttactattactggaactttctgcctatgaaatttcagtgttccatacactcattcattttgcaagaacctgtcaaatacctacatcatgctaatcattgtgttattcactgcaaaagtacttagagtttaaaatagagatcatgtccccatgatgcttacaaactattggaggtgatacacgaactgccacatataaaagagcatcataaatgctttgctggcatattctgggaggccctaaggagagcatctatattgatgtagtctgtcatgcaatgcttcctagcacaagaaatgtctacactgaggacttaaaaatgagtctgagttagtcaagcataaatgagtgatacatgagagaggagctatgctccagacaaaagaagcaattgcttaaaggtaaaaagaagcatggaatagttaaggatctgaaaggaacttaaaaatatgtaatcaataactgaatttcttgtgttttcatggggggagtacaaagatgtacaaagatgatgcacagagtttggcttcaacaactaggaaaatgtcattgttatccactgtgcattggaggaaaaacaaaacggaaagaaaggtaagagtttaatttgggatgcactgaattctgacagatagagacaactctgaaaatattaaatcttcatcaccatcgaccacctcccccagggaatttaccagcacatggaaatactttattagctatcttagatgtcccatcgtttgagacactgcttaaatggcatcatttctatcagaccactgcccatccatactaaatcctggcatcccaactttatctgtattgtaccccactcctttagaaagggatcatttactgatttaaacagcggcctcagcaaatgtgtggtttatcagtatttcagtttacttttcagtctttacagtacctagaatgtctgaagtgctaagccaatggactccattctcattctaaaccttttctgctaatgcaaatattttaaaaatctaaattaaagcacaacatcctaataatcataactttaaatactgttataatccatcctccaaggggggtgctctacatttaacagactttttgtagctactcctttaagatgaataaataattactgcatgaataaaaaaaagcagagtgaagaaattaccattttattagccttacatgagtgagacatctttgtatggagaaagcaaatctgtaggctcacaatttagaagactgtactgtaaaaaagaattagacaatttggagcaaagtactacacacttgtaaatcctggcagttgggagctgaggcaagaggattgaaagttcaagatgagccttggatgtatagtgacttcaaggtcatttagggataaatggtgggaccctatccttccactgaaaacaaaacaaaaacaaaaaatagctaaagtgatgcccttatgaaataagcaggaatctgggtgtttagcatagaagagaaagaggatggctgtgagaaaatgccacaagtaaggaaatgaatctacctttaggaatagagctgtgtgctgtaacttttacatgattaagcaagcacacccagtatctcagtttgcctgactcctgtggggctttaatcagataaaagactactcttgcacaaatttacctatcaggatcaaaccaaaatcaaagaaaaaatggaatgtgtgaggagcatattgggaacaaaaagtcatattcctaagaggccaaaggatgatgaaccctgagtacttgttaggcataagatatgatgagcacttgaagtcatttcatttacctacctgtggtggctaattttatggagccacaaataaccaggcatttgattaaacatcatctggatgtctctgtgatggtgattctctatgacactaatatttgaatcagtagactgagtaaagaaattttcatccctggtattgatgatctcatacaattattttaaggcctgaatcaagaggctaagtgacaattcaatgtttctgcctatctgcacctcaggacaatggtcctctgctttctttagactcagattcggattggaatatatatcattggttttactgtgtctcccaccttgctggctgaaactcttggaaatccaggcaacttcatcatgaccaaatttctcaatttctcaactcctacatatctatctatctatctatctatctatctatctatctatctatcttatatctctacctactcttgtctattctcttcttttttcctacccataatagcattatatatgataggtataattattgtattacaacatgttataaattatgtcttattatattagtagttttattccactctgaccaaactatataagatagacaactcaggaaacacattttgtctcaagttttcagagttttagtccatcagggtaaggcagacaaggaatagtagttaaattcctagtgataggagtatgagttagaagttgttcacattatgatagacaagggaacagaaagagcaatataggaatcagagaccagtataacttcaaaggccccttctttgtgatctatttctagcagctaggccctaccttctaaaggtttcacaacttccacacaaggctctgccaacaggggaatatgtgttcaaacattagccaaccaggaatattttcagctcaaacaataatatatacactgtatattaaaatgtacatatacaatatgtatatatatataacctatcatataccctgttgtgtgaatctgtttctgagttggcataaacaagcatctactcaccccagttagggaattgatggcaatacaaattaaggataccaccaaagtcaaatttgatgaaccagtgagttttattgagtcatttaaaacatataagtgatgggatacatatatgcatggaagcagggatctaatgaatctggtcagcttcaggaacttcctaaagtttttgagttgtttacttcctgagtccaatgtgttttatatccatatgtatggatataaaattagtataaaatatatgatgatatatagaaaatataggttaattcagatatagacatggaagaatttcaactaaaatgttgtgttcatttttatctctgtgcctgaaagttcacactcacataaattccccaaaggttatgcagtataaaagaatgctagcctgagcatctgatctgctatctcattctctttgcaaaacagtatgcaagaaagatgaatggattcataagaagaaaatggcacaagactttgggaataagtaaaaaactaaaatgaagaaagtgcttatatggattagggaaataaacatggaagaagctaggaagaaacaagaactaccatgggaaatagtaaggaaatttctcaaagaacctagtggataatatgctttcatcattgtttgtagcttcatcaaaatccaggtagggaaaatagaaagatcagacacaggatgtagaggggtccatgaagagtaaagcctttacccataagaacaataggcagaactccaaatcaaaagaatattaatgaagtggttgacagactttgattagtcacctaaacttgaaacaaagtaatccaagacaggaacatggaacacaaatggtgcaagaaatcaagggacaggatatgttgcctatggtggtctgcaagaaggtaaaacatgaagagaggcatttacttctcccagtggattccattatgatttcttttattatttatagcatggcttaggctgagttcttataatgttaaccagcaacaagcaattgcagcttgctgaaaacagaggaaatttatcaagaggatattaagcagcttactgaacccatgggtaactagacttagaggatagttaaaacaacaaagatttaccaacaagtccagccttgctttttctccatcctttcatctctctgaatttgcttacacggaggtgcatggaatatggttgctccacagctccactggtggatattatctcgttaagattcccccacaggctggttcacatggggtagacatgaccagatgtcaccatcaggaactttgacaaaggagaagaatcacaaatgatacgatcatcttcaaagacttctcccatggatgagaataaatctcagagaaactaagcaatttagagctaatcattgccccaaaagtcactgttacattggatacatgtagataccattaaataagaagatgataaatattgtaaagcattagaagagatgctggtatttaaaatacagaaagaaaagtaaatgatgaaaatgaaacctaaagaatagagacacaatggctactttctgtttctgatgacaagttacatttaaaaaaatactaagcttggtgaaaacatcttgtaatttcaaaataaaacaataccccctcaaaaaaaaacaggctgagtattttctagtgccaactctttctcagtgtgaccctggcttcaaacacactgggtggtggaaagaagagcaccaatgtcatccctctcagatccagacaacacagcacaccatgtagctcttgcttaatgatttccagtgtatgagacattcagaaaagggcctacacaagatagcgcagctttataaaactttgatcctgtagtgattgtcttgaaagaggttatcttgactggtatatgaaccacagattttccaggctatctgtgataattagcctagatcttactgtaataggagctataggtaaaagtctctgatgtctgtaattttcaagatacttttaataacaaggtactgaatcccaaccaccctagcctcaaagagacaatttatcattgcacttgcactatagaaagagtggggtcacctttaggcaaacagatctaagagtacccatgctatcaagataccttctttcttcatgtttcttttggctgcatttcttccaatgttgactcagttttctcttactctgttcttcatgtgataaagtcacagatatgtgcaacagtcataaataagcccaggagaggactcaactgtctggcttggattgtatttccaaatctgtcttgtttgttcagatttgctccccattagggctccccctcccttctccaccactcttactggctccattcctctctggtaaatgtccatttcttctgttctcctgtggcagtaatatttgtttttattgcatttctttgttctttgagaattttatacaatatattttgatcatgtgatttaccttctcccaactcctcccaggtgctccccaactcccttctcacccaaattaaagtccccccttaaaaacagaagcaaaaataaaaaattatatccatacacatttgtacccactcacatgagaaagagaaacatggagtcgaatatgtattttacaattactcctgagcatgggtcctgctctggaatatggttgatatacctagtgctactcaattgaagaaaactgatttttttcctcttcatgaagtttttcttgggataggacttagtgtcctcccgatgtgggacaggccttaaactcatcatatatctcagaatgacttgaacttctgatatgtctgcctctacctcctctccagtgctgggacaatgggcattcaccacaacacttgattttgtatggtttttattccatgttgtagatttaagggctttgtgtgtgctaggcaatactctgaactgagctaaaatccaggcccagtgtatggatacttcttaatgaacagtgtattttatatattgtgaattataaaagctggtgacttatgtggcttctctcttactaattatcactgttagttttatatttcctttctcataccttatatttaccaaattcttttaaattggtttttgtatagacaagtaactttgaagtccttttaattttactattttatgtgtatgagtgctttttctgtatacatgtatgcataccaccttcgtgtctgatgcaccacggaactggaattccagacagttgtgaattgtcatgtgtgtactgagactcaaaacagactagatcctctgaaagaacagccagtgctgttaaccactgagttaactcaccagctcctggagttcttttataataataataataataataataataataataataataatttcatacagataaaaagataagtatttttatttacaaaactgtattctaccacaggcaaattcagaaaagttgccattatgtttaggccaagctaatttttaacatacccaaataccaataataaacttcattaataatatatagcaagctaacaaaattatatatttgtttatatatatgtatattatttgttatttaaaaagttgtctgtttattcaccttacatttgtgaaacatttgctgtctgtcagaattagagttaaatcataaagatgcaatgattatgaagagttcaaacacatgcaacagacaaaagttaagaacactgaaaatcaccctgcccgattctaaagagtgcagctagcagaagaagcattcatcataaaggatagcagggcaatgcattttgatagcctagtaaaggcctctcttaggaagtgacatttaagctaaaggggaaagacataaagaagggactggtgtgtaaagttctaaaacagacaagtgtttgaaacatataagaagttgaaagaaatgagaagcaaagggagcccaagaagtgtgcgatggtgaacagtgaggagaggatctttggccagtggagaccctggtacagttgtcatagtagaagtttaatgttcagaacaagtgatcttcagccttctccagaacagggtcaaatacccactgaggccaatctttaccttgacattcacccataaataacagcccaggattgagagatgccccactgaagaatgtagaagcctaggctaaggtacaaaatgccaaagaagaagcaaccaaaacagcatatcggtttttaatcgaaaaaattaggagttttaaaaagcacccaattaaagagcatgaaaactaacctacaatatgttgaagctaaatggtgtgcacaattatttaattacaacttttatcatattattatatctaccaaacttaaaagaatcaaaaaataaatatattctactacaaagaggtgacataccattaactctatgtgagaacctgacctggttagttttacgtcaacttgaatcaagctaagtcatctgagaggagggaccctccatcaagaaaattccttcatacaatagggctgtaggcagtagggtatttccttaatcagtgattgctgagagtagatccagcccattgtgggggtgacacccttgggctgatggccctgggttctataagagagcaggctgagcaatccatgggaagcaaaccagtaagcagcacttgtccatggcctctacatcagctcctgcctccaggaacctgtccaagttgagttcctggtttcacttcctttgatgatgaatagcaatatagaaatgtaagcccaataaacccctttcccccaacttcctttttggtcttggtgcttcattgcagcatagaaacactaactaaaacagaatccatgtttttattttatgtcagttttgatacagagcaaatttaaagatattgaagataaacatcttgtttgttagtccttcattaatctgcaatggtcagataggatgggaatacgaacacagatttctctacaactctccatctataccaactaaaactattttctttggcctgggagaataaagttcattcaatcccatgccagataatgtgtataaaattctgaaatcagaacccctaggcttgttaagtatcatgttaaaaagctttctgatctgtgcaaacaacttctcggtatcgggtatgctctctgtcttttttccccttaggaaaaaagaaagaaagtgggagatgaaatgatcaagttaataaattatatgaaaagaattcacctattcatcaagattaaaaaggctaattaagtgagaagcattggatgacaatgaaattgatcttttcgttcacgctgctagaaaaaatatagcataaaatgtgaagtgctgggccaaagagaattctaaattgttaggaaaggaaatgagacacagatctaagtcttctgcagaacattcaattgttcctttatggaaagcataatcttccatcgccatgaaaactgcagcaagagcctcctgaggtaaactaaataggggagatgagaaactggccagtggcaccactaaaatgaaaattctcaaatggaatagggaatgtttttatgaaataatattaaaattctgcagagctctgaaaaagcctgatgcatgtgataggcaagtgttttcaaatctttatttccccctgctctttggtaaaagttcaaaaggcagtttctataatgtttttcccataactataaattaaagttttaagataactttaatgtcagcattctgattaaaaccaactatgctgattggctgaatttgttgatggatttgcaaattgaagaagaaccaagggtgtgacaagatgtctgcctgagatggaatctaaactcacctcagctatgctgtgcacatagatttccatggtgctcagaactagtaacagctgtatagtatagaacattgcaatgtgatgatttggaagtgaggtttgccttatgcctcctgcatagcagaaaatcaggccaacgaaatagtctaggaatccatttttttctttactataggacctgaaatgttcacagatactgaaacagcagtttaagggaactcttaaagaaaccatattttcatagcttcattttccctccagtatctttggaccatgcatatttgatgacttcaaatttacctgttagggctcttagcttgtggataatgactcccatatctcatttttcaacactgacatatagtaagacaagctgctgtaaggcctagacttcaaaccgggattgtaagtaatttggattggtggaaaagaaactaaaagcctgaacttggcctccctgtctgtctttaggtccataatcatatgagaacacttgctgcctggagggttttcatttctttataggatactgggtacatacaatttcttttttatgcttttaaaattgtagctagacttttctttctttattattttttatttatttttttcatttcacataccaaccccagttcctcctccccaacctcctcccttcccactcctcagaggggggtagggcctcccttggggagtctacaaagtcttgcataccaagttgaggcaggaccaagcccctcccctctgtattaaggctgagcaaggtatctcatgttaggggattgactccaaaaagccagttcatacacctggggtaagtcctggtcccactgccactccccctcacacacacagacacaacagattaagccacataactgtcacccacattcagagggcctcgtttggtcccatgtcagttcagagtccgtgagctcctactagctttattaatgccttaattactgaaaccccagctttaaaaatggaccatataggagataaggatagtctaatatgatatatacacaagagccattgcaactctggaaatagcagacctgaaaacaggagtccatgcttaaatgacacctttgaaactggaatctaaaaggttagttaaaacacgtcatcactgtccctatgaccactcacttttcaggatgtttaatcatgtttgatagacatttgaaggtgtgcatgcacgtgtgtgtaaaatgtagaccagattggctatgaactcatggagaatggtctttctctgctttccaagtgtatggaccaacatactcagccaaataagtggttaagttctgtacctacactgattctaacttggtaaggaaagagatgagacacagatctgagtcttttacggagcatttactgttccttcttggcatactccattagcaatgaaagtttttgtaaaagtcatccagggtaaacaaaataggtgttgagcgtacttcatttcacagggtaatctgatttctaaagtttatctcacctgaatcatgttcccagtgtgaaaagtggtggaggagggaacatagacagattcaccaaacctcccctctagtccatgatctgtaggacccagagaagccaactgaaaaatggaggactgtagatggcatttctcagatgtttggtctctctatatatagctcatgtcaattgctcagaggtactgtgccctatgagacataccctgcccaataatcaggcagagttcagcttgatatttgttaaatagtctttccctactagcctgcagccaaatgtaaataaatgtaataggtaggatgtatttatttataaaatgtaaccatgccaaaaaacgagtatcaagatgactttcaggagactgagaataatttgcaactcctcttcctttatttgctatgcattaagaatgcctatatctgctctaaagctaaaaatgtctaaaatttttattgtactatttaatataatatcctcctgaggcctcatgagcaaattttattacctttataactactacttgtaaacaatcaatgattattaatttttcctaattttcttatgcaatacactaagatctcataactgaatggtattattagactttgacaccaacacacagtaataaattaaaatgtaccatggaaacaaaatacttgttagtttctcttgacaaagtatagaatggcattaattctaacataataacttggtatttaagttgatttcactgctattattagtgagacagtaccctgctgtcacctcttggtattaaaagcctgtattcatgggaatacatactttaattcttcagccagcactattgagacaaaaagaaaagatagaaagcaaattgccttataatcacagcctactaactcttaaaatgcccatggatttaagaaatttaataagcaatttcacaatgcaatatagtgtgcaagcaatacctggctaacactcacattcaattgattttctcttttagacatcatctgattaagaaacaatattctcagtgtctagatacaaccctgagtccaaccgaggacatacaatgaaaatttcaacagagcttcaagaagaaaactacaggccagagagattgcacctttaaaaggctgctcttacaaagggaccagagttggttttcagcaccacatagcatctcacaaccatttgtaagcccagttacaaggaatctgatgccctcttctgcaggtaccacatgcacagggcatacatacataaaagcaaaacacccatacacataaataaaaataactaaatatatttaaaaagaagtgtagaatcatgttagagtacccaatttattccttcatttgggaaatgtttgtgttgtcttcaattataccagctctatttgttaaatgttcaaagaccaattggtgtgaaatctggagcctaaaactaaccagttcctgcagtctatctgtcttctgggaaagggttgggaaaaatctcaaagttttatgtaaaactcagaggtagaagtctaacatcatataaaatatcatggaagacatagcagaaggaatgccagagccaggggatggggagtggtgctgtgaagtattgtgaagtgctgttgtctacactgaaagaccatatcagccaaaaacccaacctagatgggtagatgattttgaggccccagccctaacgaaggaggtattggtaatgaatagttgctgtgggggatacagtaattctttttcagaggatgtggcctctagtaagttccccatgctccagaagagggtccacacccatgcacatatgggcagcattaactggacttagtgagttagaagaaggaagaggacaataagggggaagaggaagaggaaggaaggaaaagaaagaaaaattggaaaggctcatgttgcaggtgatgaagcagagttggagggggaaacggagagtagatatgatcataagttatcatatatcattgtacaaaattctcaaaaatgaagaattaaaagtagagttgatgtgactgctgaatgaggatcacctgggttaaaaacattttgttctgttaccagctgagcagcctgtggagactcagggaaacctatctcattcatgtgacaatgacatcacctacctatatctcacaccgcttgaacatgaagatgacaacatacattccaaattttgttagctacttttcataaaaaaatagtagtttctaactaaaccaggaaccagtgtagctgcctgaatctcaaaaggcattttattacacacacacactcttctctctctctctctctctctctctctctctctctctctctctctctctctctctctctctctatctctctgtctctctctgtctctctctatctctctcccgtctctctctgtctctctatctatctatctatctgtctatctatctatctatctatctatctatctatctatctatctatctctccagttcagaatgttgcaaaaaatatggccatcatctgcttcctttgattctttagactcctctgactcattagtgaattaacctcagtaattatatgacaacaggaatagcttgcactgatgggtcagtgtgggaaatggaaaggcacacttttatcttagctcctgagcagtcttctgcacaaactctttccatttttaatctcccaagctttctgatttatgaaggtgttaagtcagtttacatacattctataaccaaaaaaaagtgaagcttcatgagctcagttacatatcattatgtttgtgtcatttttcacaaaggtaacatatcattgcctttacaaagtagttttcataaaagtgttaaatcatttccagaaaacagacgtattaaaatggactatattatacttgggaggcttacagataatggtaacgtcaagatctgtctgtttgattaactgattctttacatctgtgaggaatcagctgcagatgataggaatgattgacacagtccatttcaggctgatgagcagagcacaccgtcctttaaatgcaggctattgcaaaggagaaaagaaagtcaagcatcagaaagaagacatagggcaaattcatgaaactctaaaagaaagcacagccacactactctagatcactcctctcatttaaagaccacccaaaactggtcctcagtacacaaagcagagagcaggaaacatgcccctctgaaattttctgtgatatctttttttcttttataaattagataactagacttttttgaaaaaaatataatgcagcctcttgaagtactgcaatgtgatgtcaattttgatttcttttataatattcatgcaattctctgtttgccttcattaaaaatgctgttagtttatttgcatggaaaatgctatattatttcagaaagagaaaaagggtgaagatttaaaaagcacctagcttattttattcaataacttcttcttaaactactgcctattatcccccgagctgagttagactaacacataaaaccatgtccctcctcaaggagattacttcacaccaagacaaggagcattatgtaaatacagggtcctgataatgtagtttgtgaaagacaccccatataaattaaatagctagaaatacaagcaaggaagaaatctttgatgagttgttcacataaagttcaaataggaagagtgggaaaggaagaaaagtagttttccatgtaacaatatagaattttgtcttagggtttctattgctatgacaaaacaccaagacccaaaagcaagcttgggaggaaagtgtttattcggtttatacttccaggtcatactccatcattggagaaagtcagaacagggaaacaagcagggctggaagctggaggcagaagctgatgcagagccgtggagttaatgctttctggcttgcctcccatggcttgctcagcctgttttcttatagaacccagttccagaagtccaggaaaggcaccacccatcatagatgccccctccagtacattgagaaaatgccttacagagggatcttatggaggtatttcctcaactgaggctccttcctctctgatgactctagcttgcatcaagttgacacagaaaaccatacagtacaactttcaaaagtttctaaattagttattcattcataatattttatcaaccaagatgaaggctgcaattccatgttaagagatttgtatgacccaaggcttatagaagtcttagtcatctttcaagacacaacactagtgtaatatgacaaaattttctgattccctcgatgttacttataattgatttattacattttatagtatatttcccatgataaaaaacaccttccattttatactctaacacccagtatgtcacaagctcctaaaaagacatttgtcttcatccataaccactcacatggcactggcaattatttgcttaaatattgaatgaggcgaagatcaatcttcagaaactggagaattctctaaatgcaatccactccttctccactttatactgtgatattgttagttattagagtctgaaataggattggagccatctgtgagaggagcttagagagtgggtttatttattctcaaactttgtatcagaaagtgaaacctccagactcagtcagaacttactcaactgactgaatagtttaaagtagctgatcttgaattatttttaagattctcatctccatttgcacaaaacatagaaaaaccaggtaaagactaaatatgttaaatcaatgtcaagaatcaattttagcactttcccttgccttcagtaacagattatttccattgtccccttcattgctcaattgaaaagataaagtttatacctcacttttcctgtggatgtgaaggctgagattcagagagaaatccttattgcatgcacacagaactcccaagaatttcaaggtccaatgtgttggttaactatagacaatcattgtttctgtaatgtgctgttcagtgaaaagagcaactagatgcctggaagtgggaatttccactttcttattgctattttgtaaaagctgtgggtcccaggactggtcatctgtttagttcctcagtcagttgacccacttataaaatctatatccttcccaatgatgttcttttatgactctaaaggtgaggtctctccttaacggctattgaaataagagccagggagctgggcttacaatattatggtctggctcagttttgcaatttatactccctccttccccatttttaatttctcccacatgaggctttatgggagaactatagcacacttcactatgcagccctttttattctggaaggttttgtgaaccaatcagtggtttgtattttctcattgtttataactccttaggagctgagagaatagaacaggaaattttatgcattaagtaggagagagagagctgtgtagatgcctcagtcaaattattaaataagccaaattagtttcacctgggtttgccttttcccatccactgtgtatttttgcacattcagccttcaaggtattattttgcctagtctgcatgactcttcatataaatccattagtaaaacagcagtctccaactttactgtctagctgaggctaccataactgggatgagtataattcaaggaaaggaaacagggaagtgaagtaaaaattaaatacaatacctagaatcaaattgatttcaaagaaaatcactgttaaaaggccagctaaggactacacagatctcctacagtcttccttcctaaccccatcctacagtctcagcagctaagagtgaggacattttcttcctgcaagtgctctggcaatggccaggaaatcaggtagaaaacctttactcttctaattccaaaattccaattctccaatctcattcatagcactgtagcagaccacctgctgggacatgtcttctctctcttacatcatttgctgtggcctcccagctttcctctctcctgtagaccctatcagaccactcctctgctcttctacaccaccccacattgttgcatttagttcctaaaaccaagaaacaagttctacttgggacccaggatccacacctggaggagactcagaatccttctctaccaggcaacccatagcccccacactttcctaagaaccagaaaaggcaatggaaaccaagcaatggaaaaacccgccctgtagcgaacagtgtaagccacacctgctagaaggaggtgttcaggcatggacacctcctttcagaagactttagggttcagttgatgtaggcatagttaggatgtgtcatagcagattattgtatcttcttgtatttcacccttatggttgttaattttggatactttacactgttaagccttaatcctcttttagactaaaaggggaattgtaggggacagtgtaagccacacctgctagaagctggctacaggtgtgcctgaccacgcctgtgggggcgtggtcaaggtgaggtcaggatgaaatgtgttagggttttaaggggcagcaaggcacatgggagccccttctctctggcctccctgcctcactgcccctagcatgctctggcttgcgtttggctggtgtttttctaataaaggatatctttatctcaagctcctttcattccttaataccacccaacaaagacaagagcagatatcagcacctagaattacaatcatataaacccagaagcctagacactagtataaaaacaaaataaatagcagccaggacatttttgcctccactagagcccagcaactctactacagtaagccataagaaatgcaacatagccgaagcacaagaaaaacacttcaaaataaattttatggctatgttgtgatgttaagatgatattaataaaaccattaatgaaatataagaaagcataactgataggggaggtccttctgtgtatatgtttattttattggttgataaacaaagtactgttggccaataggaaatcaagttaggtgggactaggagtcaaagagaattctgggaaatagtaaagaagtcttgcgatctaggcaggaagtgacatagcaggcagactcatatataagcaaggacaagacggaagtcgttccttttctcttcctcttcctcctggtcactgctctggagtctccatgtgatctgccagcaagagagggcaccagtggaaggtgttctcgataagataagtcttataaaatatatagatttatgataattaatactgagctagcagatgagaaataatagtcattggccaagcagcatttgtacctaatataagtctctgtgtgttacttgggaccctaacgtggtggtggaaagtgccctcatggcatcagggcttgggcggcttggtggaaagacttattgttacacataaacagtggaatgaaatgaaagaaacagttcaagatgtgaacatagaaatagagtgaataaagacaacctaaacaagtaaaactggaaattaaaattttgtgaatttgaataggaatctcacaggcaagccttaatgacagaatataagaaattgaagagagaatcacaagcattggaaataaaatagaagtaagggatacctcagtaaaagaaaatgttaaatctaaaaataaacaaacaaaaaatccaggcacaaaacatctaggaaatattggacactatgaaaagatcaaatttagaatagagagaataaaggaagatgaaacccagctcaaagggtttctctttcaacagaaaatattttcaacaaaataatagaagaaaatttcccaaacgtaaagaaaaaatgatctcactagggtataaaaagcatacagaaacccaaatagactggaccagaaaagaaattccccatgacacataatagcaaaaaaaagaaaaatactaaatgtacaggtcaaagtaacatataaaggcaacctattaaaataacatctcacttctctactgagactccaaaagccagaggggcttgaatagatgttatacaacctctaagaaaccacagataccagctcagcctactatacccagcaaaagtttcaatcacaatggatgaaaaaaggcattctacaataaaacttaagcagtattgatataccaatccagctctatagagggggctagaaggaaatgaagaggctaactacaaccaagaaaacacaattaataaataacttcagactagtaaatcaaaggaagggggaaacacaccacaataagaaaataatgtcaatgaacaaacatttctcattgataacattcaacaccaacagtttcaataaaatgactcagactatcagaaggaatacaaaaacaggatccattcttctcttgcatttaagaaacacaccttaacaccaacaaaagacatggcctcagagtagaaggatgaaaaaagaaacaagaagtatggccactttaaatagacttcaagcaaaaactaatcataaaatatttgtaaggacactatatactcataaaaggaaaatccaccaagataatatttcaattcttaatatcagtggaaaggacaccatcattaggataaagcagcagcctacagaatggaagattatttttaccaactacacatcccatagattgctgatatccaaaatatataaagaactcaaaaactgggcatcaaggaaataaataacccaattaaaaatggggtaccaatctaaacagagagtcctcaaaagagaaaacacaaaaagcttaaacacactttaagaaatgtttaatatccttactaatcaaggaaataaaagctaaaactactttgagaatattacacagattaagaatgatcaaaatcaataatgcaaataacagctcatgctagggaggattatgaacactcattcatagctggcggtattggaaacttgtactgccactatggaaatcagtttgatggttcttcatgaacttgagaataaatctacttcaagacccagttatactactcttgggcatatatccaaggactctatatcctaccacagatacacttactcaaccatgttcatggtcaatgtcttcataatatccagcagttggaaacagactaaatgtcagtagatggatggataaagaaagggtgatgcatttacagtaataactgtgttttaattaaatttgcaggtacatggatagatcaggaaaaaatccctaagtgggctaacccatatccaaaaagacaaacacattttataattgcttatatgtagatgttagctgtgaagtctttgataagcaagctacaatacatataaccacagaggttatgtataaagtaacacacacacacacacacacacacacacacacacacacacacacacacacacacacacgagaaggcaggctaaatgtaatcaccaaatgacagggaagatggagcccaaactagacatgcctcatcatcaaatgaagcctaccagtcatagaatgagttacatgtaattgagttgttggccaaaagggcacatgggaaccctaacaacctaggctctttccaaggttattagttgctctctattggttgctgaagacaacaccaatacaactaattgaatatagagtaatcaagttggtgccttcctggaatcttcatccctaccaactagtgttacctagaaccttcatccatactaactaaatagaaccgccatccctactaatgttacttagggacttcatccctactaactagtgttgcctagaaccttcatccatactatctaaatagaaccgccatccctactaactagtgttacctagaaccttcatcactactaactagtgttacttagaaccttcatccctactaactagtgttacctagaaccttcatccttactaaccagtgtttatggtactggatgttactctgtactctattaaagaagaaagttagataccaacccacctacaaatgctagaatctacaattgcaaccttcatgcaagatgtgttagtacaatagtggcacaatgccttcaggattagccaactaatatcttactggacgtatgacccactccatgaaatacagcccatacctgaaactttggccaagaatctgactctaggtaggtcagggacctagagaaaaccaaatagttcaggtctggtaaaggaacatagcaattagatggctcctgtggacattctgctatactcagatatcagtgacttgttcagccatcatcaaaggatctttctcctgcagagatttgaataaatacaatgatccatagctggacaatgtgcggaaaatgagagaacttagatcattcagtcctaaatgagatatctccatcaattccctccccacagggctcagggaaccctgtggatgaggaggcagaaagattgtaagagccaaaaggttcgaaggacccatgaacatgaattaacataaactgtggcagcatgacagggcctgaacaggtatgggcttgatgttgttccagcactgagagaggaatacaagccctcatccctaaaatagaagctatctcaaatggataacttctcacaaagaaaaagttttctccaatagagcctcaatgggcatacaaaccactatttagatcaagccctgtgcctagcagtaaatgtgtgtgtgtgtgtgtgtgtgtgtgtgtgtgtgtgtgtgtgtgtgtgtgtgtgtgtgtgtgtgtgcatctgtgtttattgagcttttgctttggtttgatttttctgttttttttttaatccagttctggcttgttttattttttattttatctagctttattgttattacttttgaagatgcctatttgtatcctaatgagagagagaaagaaagggaattgatttaggcattggggaaacacggagggtgtgggaagagttgagagaaaggaaactacaatcagaatatgttgcatttttcaaaatctattttaataaaaagtaaaaatatattgttttaaaatatatattcaataaaaaagtttaaagtccagacaaataaaacaatttctcctgtcctggtttgttcaacttgtaatccttgctaaaaactttaaaatcagaactatctaagtcaatgtattcagagtcatatctgcaatgtgctcaggtggtatgtgctgaattggtctcatggaaacagccctggaaattcagatatgctgacatatacaaggaggcttgtatagagattactcacagtgtagaagccagaaaactatcctggattggccttaactcatgcctaggtgctgtaagtgcctcacaaagagaattttatatgattctcacaataactccaagaattaaatgtcatgatcacctcatttaaaactattcctcagttaaattgctgagggccataaaaggaatatttaaatttacttgggattcttagccctgagttttggacttaaagttcattgaatccttaccctgctttcccatgtgactgtaaatcatcttagagatgtcttttcttcactgtgcccccactggtattttgtccatcatgaaatgaatgactttgtttggctgttttttctaccatgatattcttcttcactgtaaccagaaaacaacaaagtcagttgacaaaagtcagggctttctttgctctcttggagtgttttatcctggcatttttgtctcaataacaacaacaataaaagttaaggtaggtaggtggaggataaatagaagatgataggtgatagagagatggatagataagtagatagagatggatagatgataatgatggatagatagatagatagatagatagatagatagatagatagatagatagatagatgaggaaatggctcacattactaggaattcccacaaaaggaccttgtaaactggaaacctaaggaatctggcagcttggctcagtcactgtctgaaggcctcagaaccagtgcagccagtgaagaacattcaggccaagtccaaggcttgagaatgcaagaagttagcaatggaaattctgggcttcaaaggctagagaacatagggttctgatgtccagggtaaagaaagggtagacaagctccagtagtgaaagagacaatgaatctttaacctgccacttgttctgtctgggccttcagctagttaaactgcacctgtctatacagtgtgagtgagggcagatattcctactaatttaaatgtcaatgtcttctgggagcaccccaaaagacaaacaaaaatagtgctttcctagattccagtgtcctctaatataattagttgatacttaaaaactattcatcacagagaaaacacttaatttaccaatttatctgaaaaactcattgaaaatattttcagtcttatgaagtgaaattggaaagagttatagaaaatcatcattggcatttcttttaattaagtggcagtagagtgaataaggagtgatttccatcaccttctggacagcaccaaattactgacatctaaaaataaaaatgaaatattactcatgaacttcttgaaaaactgagcagaaggatttatatgagctaaataccagatgagactgaaactattaatgtttgtcaaatgtaattgcaactaagcacaacacaaaatttactgatatacatacagaaaaatctagggatgaagtatggtggcattatttatttatagtaaaataccccagtgttagcatgtatgtcaaaaaattaaataaaaataattcagctgaaaaatggaaaattctagtaaaacattaatatctattatgatggttaattttgtgtcatcttgagtaggctgaaagatgcccaggtagttcataatacataatttcttagcatgcctgtgaagattttctagactcagttgactggtcgaatgatgttgccactcaccattgtgaatatgcatcatccagttggctgaaagaaatgaatttctctccctcttcctgagataggccatccattacccttatctccagtatcggaggtcctgattcttgaactcttaaattctggagtttgtaccaatgacccccaacccacctttagcccaccaagttctcaatctttgaacttcacattgagagtcttaaaatagaatcccctgtctcccagtctttaaattaagatggaatcatgttattagaagccacgattctctagttcgaagttaacgtatggtggaatttcttaactttcacaatcacatagattgattacattgtgaatttgtgagggtgtttgtggtgtggttgttgttgttgttgttgttgttgttgttgttgttgttgttgttgttgagactggagccagaccttgaataaattttaacaagaaaaagaggcttttattcatgtattggagccaggtctatacccaggactcaggatttctgaatgctgtgcccagccacctgagtcagaggtttacaaaggcaaagaacacagttacattctgtttaggtaggtaaaagcataaagtcctctcatgcaaaacatgcttttgtttacagaagcagaaacagaaggtgtgttactgtcatgtaaatcaggaaattatagaattaacccttagcagtgtttaacatttttgaagtccatttttgtattttattttatttggttttttgagacagggtttctctgtgtagctttggagtctatctggcacttgctctgtagaccagatctctggaactcacagagatccacctgcctctgcctccccagtgctaggattaaagacagccttgaagtccatttttacttcacatttctcttaagcacaggaactttaagcttttaaacataaaattagccatcacattccccccttgagttacaccctaagtcaaatcctgactctgtggagggtacctgttcatattaggacttaatcaccttcggctaaatagctcctaaacatgagcttatgtatctatatggttgcagcatttataatgcaggggccaacaggaagcaacaagagcagagggcttgctgatgtgggatatttgaccacattgtgaacctgagtttgcatttgttttaattaaataaaataaaccttgggtcaagaggtagaaccaacaacaagttgacagaaagtaatcatagtcagagggagtctggaataaggatagagaaacacacaggaagtagtagggagggtctttgagtgtggtggtcttttttgatttggcagagcagaaggacactctctttctgagatggtagtaaagagggaagttcagctagttgcttatcaacctctctgagctaccgggttttcacctcagcctcccgagtcttactgataaatagaacgatagagatttagttaaagactgcggttggtgtcaacatcaggaggcagatccggtgtgacataaaagtccctcctggccactgcctgagaagcaggccagtaacttcagagccacagttactggctgtagattcagatgcagccattgtgtagacagaaacacaacagctattggccctatgactagtggccctgtgacaacagacaatagaggtactaacatttcctcctcataagaccttttccatctgtgaggtgctttcaaaatttggccaaattattcttgataatttctgagtgctttgcatagaaactacttttcccttaaagccatacagtgacatccttgctctgcatagggcaggctttcaagctgtaaacccaactcagctaacaaagccacctgttcttttagcttagtagtagatttttttctactgtagacagatgctgagttatttggcatcctaggaatttgaaggtagtgtcagtcattattgtaccagtggcaccaagagtagctcttgctggtactaacccttagcttattatgaaggctatggggatggaaattgcacatttttccctgaacatggaggctggaaggacctgtgtccattcatacatgtcttttctcccttctggaccatcataaatatactttcagggtcatagggatatcaagatacagaatttcagggattgatgtatctgccaagtgggcaagcaagagtgcaacccatcatcacaagcaaactaatcagtttcaaccaggaggtgaaggaaggaatttacccctgacaaagtagtgactaggagctggtgacattcatgtggtcccttcagcaggatcccagtttccttcagatgtaacgttccagctttttgttgaggataatgggcaacatactctcttctgtaactgcttctcatctcaggttaggatgttgttgttagggcccatgaagactgaaatgctagtcaaagaccaagagttgcaggttcaggcagtttgctgacccagctgaggagacaagtagcaatctctttggctggaccggtttacatcagttcagtctatttgacctgtggcaggtagttctaagttgcaactctctgaagtttacattaatttaaagtttacagaaagaggtcaaatgtaatatgaattagtaaaatacccagagactgatattggggttcaaactccaagctgaagaacagaaaagcaaagtagcgagccactagctcctaccactacctcaggctgaatgggctgatcctgctgtctctcagcatagctggagaatgaatgctcctatcttcattgtggctggagaatgaatgcctgactcagtgaccctgatcctttcttaaacacctctcatgagtcctgggaccaaaggtgtgagctctgattctctttcagagtgaatcactctaatgtatccctgggtggccttaaactaacagagatctgtctgcctttatctcctgagtcctgggattaaaggtgtgacacaaaatagctgtgacggacttcactttctgaatcctcaggcaagctttaataaatcataaataatatatcaccacagtaaaagttttagatatgttagactaagcactatttgtaatctctacagaatagcagagaaaagcaatagattcacactttggaaatcggccccccaaaatgatttggggttaaaagcattaacacactttcctgtgtccagattgctgggtacacatagactgcacatagttgtttttagcacaatgagaagcaccttttagtctatgcttagaaaacaagcaaaggaaaatggaaaatttgagcttgtttgtacagaagtcagtgctttacagagccaggtcaatagcctgccggaagtccattgatgaatacattaaaactctgaatctttgaagtctcaacaccatatatcatgtttaaattttattattatttttaattattttctcagacccttacaacttacataaactttaaatccttttccattcaatcattcaccatgagacacaagtgattgtttactgaaagtagtcattgcaaagcaagctctttcaaatagacgaatagtagaaagttacaatggaaacgtgttttatgggtttgtctttctcaccagaagaccaaataactctagaaaaagcaaggcctgagtttgtcatatgaaatgcattgttgatgcagctgctgctaaactgataaagctacagttagccatcaacaccatcaaagatctggaaaggataatgaaggaacttttttttttagaaggaactataaaccaaatgatttctgtatcaataaaatgacagcaacttaccaggtacctgaatcattaccctgggctcctccttggcaatttccatggagacagagtgccttcagtttccagcacacagaacaacattaactctttgactgcctcactgggcagcatcagcctttgacccaaaagatccaagagacttctccgttgggtgaggaatttaagagactagcctaccttagtgaggcagagaggagagtcaattctcctgcttgtcaacagtcctgcttgtcaacagtctcactgagaccctagaggtggcctaggtaaggagcgcttgtgccaaaaaaagactcctccatgatcaagaaggagtctttttctttggagaagaccttagggctacctctaggatctggcatttttgtctatcataggaagcctttttggttcaacactttaatttccaaattcagcagccctctgaagagttttgagggacatctattaagtacatctaactttgatgagactttatttgtttttagttacttgttttagacttaactttgaaaacagaagattaaataaagcttgtccctgttggtgaattacatttttaatcctagccttttcagtgttgttccccaatattttttctagttgctcaggcattatataaaagaatattccaaaggtaaaagatagaaatatctacattccctatttgtaaagctttctatttgtattttcccatgcatataaatgcatgtaagtactttaatatttcagtgatgaaacatgtttttaaatcctattgctttaaataaacctagttttcattatgttggcctcgtctgttcttattctcaggataagtatcaccacagaaaaatccatcctgatacagaatatcttggaaacttgctgttatttaaaaaatatctatttcttttaaatatgagttgaatttaatatatatattatatatatatatatatatatagtatactgtagtaaattaagattacttatgtatagatttccaaacatcaatccccttgctacaaatttcatgattttacagatctttaactgtacctaataaacttacaaatcttgaggtacggaaaatttaaaaataatatcctcacacatcttgagatgagattcaaatgttagcaaaagtttaaaaactaaactaaacaaaacaaaagaaagcaaaaagagtaggataagagtgacaataatctccatttgaaatatccatccttttgacttgttttgctctcctttctctgtcatacaatcaggtgggtctcttggcacaggatagagattttggaggaaaccaaatgaatattcttgagtccacaggagggaatgcaataacccaatttgagagccaacttttcattaaagtagacagaataaaatattttatattatccatacctaaaagacacccaaattgctgtaaaattgaatctggtggccagagggagggaccagagtatcctgggaccaaagaagacatagagatcagaaattactgaggcctggcaataggcagatttctctacaggagggagctgcaagatgccccagccagtgaggagcacatacacactgtagctaaactacttcttcactctctccctcacccgcttggtctggactccagctcccacatctgtaacacacttaggacacaccagaaagcacagatccaacaaacagtagctttaaaaagacggaacattcacacactcaggagagaccagacaaaaacaaacattttgtgaccaccattgttcatatgtccaacagctgatttccatctaagcttttccaacaagggccagaggtccaacagtccaacagtggtccctctaatcttggaattaatactgtatccagcttttccatgaatcccccaaaaaagtgtgcttacttacacctcacttacacctccagaggtttgctgatgcatcttttctcacagtctaggtgtcgggaacctcctggtggctccctccaaacattgggcgcatctgatttctcatctcccagccaggagcctccagagtcctaaagccagccaaaaattaagcttagcagtccttaacatttggaagaccactttttttgctttatagttacttttgtgtgctttctagttattttaagcacagaaattttaaacttttaaacataaagttagccagcaacatagcattagccatcacagtgtgtgcatgtgcataacacataaacctatctgttctgtagaatatagactaataaatatatttggagatgttatgtatagttttgcatgtttcttttcataatctttccatgttggaagatttgctttaaataggaaaaataatattaaataaccaaaagattaccaaagcaaaacaaggagaaaaggaccaagtatagtgctgtatgcctgtaatctcagagctgaagaggctgaggtgggagaatttcaagttcaaagcaagcttgtggggtggggagagggaaggaggaagaggaagaggaagagggagagaagaagaggaaaagacaggagcagagtattgttcgtggaggctccttaaaccagaaggtaaataactgaacatagcccaggaagtccctgaaattgacaaaattcagtaggtcccttctagctcagattaaaaagtaaagactgctgagagtcactctcagaccagataagccacaaagactttcaggtaaatctgtcttcaaggaagaccctgaggccagactaactgcctggaagaagcagaaactagctaagctgcctaaaagaggcttagataaagtgaggcacctagaaatgatactcttgaacctgatgatttgtctaaaggctgtacaaagtgctctataaggctgtacaaagtgctctataaggctgtacaaagtgctctataaggctgtacaaagtagtctataaggctgtacaaagtgctctatgcccccaacatttgtgattgttatgttctacatacagtgtttttattttcacattcatttaagtaaaaaattgagtggtcttaaaaatattattgagaattataaagttgacagctgaatagataaagactggaggatattgggctttttaaaaaaggaaaagttaaaatcagttttggcaagtcattttctagaaactttagtcctaaaacatgcccccagaaaaataatgtagatagaaaatgagttaaggaatattactccataatcctctaagtgagtcataatacacattagcaaattaaaagcttagaatcatttgcagtaaagaatcttatttaattttaactcagcagtttacaaatttacttgagcttctctggaatgaacaatgatgttcaaatgcaaagggtttttactggataattaggagagtaagtttttcccaagactattgagacttgtttttagaaacattggttgtgaaaagttgtacagagaggagagcttcctgggatttatgtaagaccaggaaacacttcaggtcttactatctcattctctgaggtcttctgggggtcagatagcagccaagccaagccagcagaaactaagaactagctgaatggggagaggagacttggaaagtgatgaagtgttgactagctctggtacagtttaggtcccaaaagaaatataactgggcagggagctaaagaagctgtagattctgcacagacagctgataaggggctcttaggcctcagcaaagggaaaagggagctttggggactccaaaattagtttagaaagattcactgtgagtgttaggggtcttttttgctttcagaatacagtctcaggattaactttcaaatgtggattatcatttatttttctgacatctccctgtattttgctgggtgtttaaaaattgtccacatgatgacaagtgctgtccagaagttaaattaaaatgaaaatttaaaggattattttcaatgtctgtagaacattgcttcaaatctgcttatttactaatgatgctttttaatatgaaaagggtcaaaattcatacaggatcacatggtcaaaaccaagaagactactacattagcaattttataatgggtttattttgtaagcacaaaattaaaaatgcaaaaaaacagtatggagcagaattttactttatgaactaagaaatggcaaagatgctgggcattggtggcacacgcctttaatctcagcactcaggaggcagaagcaggtggatctctgtgagttcgagaccaccctggtctacaagagctagttccaggacagcctccaaagccacagagaaaccctgtctcaaaaaaaaaagaaagaaagaaagaaagaaagaaagaaagaaagaaagaaagaaagaaaaagaaaaagaaatggcaaaggcaatagccagatactctcatttctggaatgagaaatgatattcaagtgcaaagcttttgctcctaaatagttatggggataacattttgtgtggggttcccttatctagcacacagcatgctataaatatcagccatgcattccttcacagaaatcattgtgtttatttcaccatatattgctcaatatagtatagctgagagacttacagttttctattttatggacaagaaaacaaaaataatataaactgagacattcaaactgattcactgcaatagacaacccctgaagaaatggagaaggaaggcagtatttttctaaatgcataaattaaaccataggccagaatagaaaaaaatatttattgcttttgattttctaaattttaatgtgatagaagaagaccatagcatgaatcactaacaatgtgaaaaccaatgatgtcaatcagctttggaaatgaggggacctatgatatttctacaccttcttactctataaaatcttactggttcttccaatcgctgactagatttgcaataatagaatgacagaggatataattgccacaaaatcatgcattacagtctgtaaggattgtatcattcatgctcaacttcactagggagtgcaatgaagtaaggagactatgagcgtggttcaagggggactgaagaactccatagatcattttgaatcaagcgagtcacagtttcttttgcaaccattaatgaggtttaccctccttcactgtggcaaggagatgatctctttctttatttatctataaaatgaaactcacagatggagagctcccctcaaacatttctacattttttttaatctttttaattctatataggtttctttctcaagatttgttttactttcattaggcctcctaaatgtggataaacttcaaaattcctaccctcaatgtcatagtctgtaggtggacttctttgtgacatcagctagttcccaaataaccacccagagacttattactaattacaaatgcttggccaaaagctcaggcttgttactaactagctcttacattttaaattgacccatatttcttttctaccatataccatgcacaggatggtaatttttttcaacactggaaagttcatcttgtttctttccgaattgcctcatgactcctcccttcttctttcatgctctctttttgtctaaaagtcccacctaacccctacctgctattgaccaatcagttcttttattaaccaatgagagtaatacatattttcaatttgcaaagatttactcacaacaatagtctattcatatgaagcttaattctgattattagcttgattgccctaacaaaatctggggcattaaagaagcacacattagggtgtgtctgtgaggtagtatccaaagaggttttgttgacaggaagagcaccagcccataggatagattcttcttctaacttccttgtgggtccaagggatagggtgcttctactgctacactctctcccactccattttagatttcatttatctaaactttgagaccaagcaaagcctctctaaagttaccttttgttaggtacttggtagcagtgttgagaaaagtagctgatacaacacacttacttgttcagcttgggtatctgtggcttaacaagaatgtctgctacacgatttccagaacacatgtggtcatctatagtctatggttcggaattgatttcatcatttattgacccttttgttctagttccatgaagactgggtgacatttcaaatgacttcctataccctagagcctgaattctcagacctaaaggaaggtcttaccctttgtgagaggtgcttgaaccaaacattttaagcaggcttatcatggacttactctgaggtatgaaaaatgtgcttgttttttgtgggtactaacctgacctgacctaaaataatggtgtaattttcagcaagcctatttcttccaaaccaccagcccatatattctaattaggaaaacaggtttttgttctgtgtgtttattttattttcaaattccacttctatctaaatagctacattgttttgaatatgaaagatcccccaacaggctcatgtgttgggacaagaattccccagctagctagtgctgctattttaggaggtttggggacctttaagaggtgagacacagctggcacaataggtcactggggaatggctaatgtataaactggccccattttggtccaaataccattcttatctttgaaatgcaaacgtcaagggaaataaagcctcttccttctaggttccatgaaagaatggggccttatctacagtgtgcaccttgctcaatgttgtacaagtgcccccatccctgaagaagtggaggctgcttaccttctggataagtacagcagggaattatctatttaccaattgagtgtaagataaactgcgatgacatgaggtgctgtgacattcttctgcttaaggactagtaattgtcattcttgaacacatgtctgtaacattatgtgtcaatctgccattatatatgtgaaatttcagtgtatttataccctttttgtagattacccatgatgcacatcatgctctgttttaacacttattcaagaataagaactttatttctctactgcattggaggagatattttctgggttagaagattttgtttctaattctatttccccaacaatgagtattctagatcaataagtcaaactttttctcaaaggttcctcatagagaaatgttgggggaaagcaaagatagagcaaactgaagcgtataatcaccagttttctcttggtatatttatgtgttcagtgtgttggtgttctaagaatatttttcaagtcattgactctttatcctgcattttcaccaaccatttctttcttctagtaattccttaaaagtgaattctttttctatgtgttcagtgacagctttctcaaaacctcaatagtgctttctgaataagactctctctaaatgaaagtgaaggagggaagaaggggaaagagagaactagaaagcaggaagagagaaggaaggaaggagggaggaatggaggcagggaaagaaaaaagaaagaaagaaagaaagaaaagaaaagaaaagaaaagaaaagaaaagaaaagaaaagaaaagaaaagagaggaagagaggaggtcaaaggcaggctggacctttctgctctcaaagtcaccagagagagatgagtgagttactgtcggcactctgttattggagaaacatgcaaattagcttatgtcttagtaacaaggattcaacagcatctattggaccccaacaaaaataaatctcctggaataccttcatcacatgaacaggggagacacactgacatcaagtcaccccactaccagtatgggggaatgactgcttgttgaatatggtcttcatatttgtacattcctagtgctattcaaaatgttaccatctaagatagtattattttattgatctaaataaagttgtagaatatatccaaagactacagtaagattatccttttttgaagcttttagagaaaaattggcacaagattttctggtaagactgatgttattaatgtggaaagtcaatcaaatttgcattgacttatatgagcttcattggtggatatgattgtagaccatgaatctcattctgggtagatccacaggattccagctactattagtcagttgaatcaagtaaattctgacttgtttgttggagaccttttgaatataattactttagctggatccaatggacaaaaaccaatgtatacagttcatattagatttcaggactcattaaatggacagaaactgtatggtttcatcttggcatgttaaatgaagaaattttgcaaatcggccagcactattcttataaatgattcttcttatgaatgatttggtattgctgaactgtcatttaatagcagattaaaactatgaatcctgtctttgtttgcctgaagcagtgcttccaagggtgaatgtacacagcctaaactagtgtgcttgattagatgatagaaacaatgcctactatttctccgcaatctcaatacttctgtatttgacatgcctattgctcataaaatattaagatttgtatattaaatgaactctaataaagtatataattatacatattgtaaaattaagtcctgtacaagagctcctgagcaaactgggagcacagggaggggggaggtaagagaaaaaagaaggggagaagaagatgggggaggagaatatgaggatcaggaagactgaatcaggggaaagaatacggaaggagagcaagaaaagagataccttaatacagggagccattatagccattataggtttaaagagaaatctgacactagggaaatgtccagagatccacaaagatgaccccaactaagaatctaaacaatagtggagaggttaccttcaataccctttcctcataaagagactgatgactaccttaaatgccatcatagagccttcatccagtagctgatggaagcagaagcagagactcatagctaagcaatgagccaaattcctggaatctagttgtagagaaggaggagtgatgagcaaagaggtaaagaccatgctggggaacccacagaaacagctgacctgagcaagtgagagctcatggaccccagtctgacagctggggaaccaccataggaccgaacgaggtcccctgaacatgtgtgtcagttaggaggcctggacagtctagggggcctctgacagtgaaaccactatttatccctagtgcacaaatggactttgggagcccattcaccatggaggaatagtctctcagcctagatacatcagggagggcctaggtcctgctccaaatgatatgacagactttgttgatcccacatggaaggcctcaccctccctggggagtggatgggggttgggatagggaggtcagtgagggcatgggaggatgagagagagagagggaactgggattgatatgcaagattgtttctaatttaaacatacatttatataaaaaataaaaccgctttcaaaaaagaaaaataattaagtcctgtattatatttttcagcattgctgttgttctaaagataattttctgtttttgtttgaaatgtttttcatttttcttgtgaccaacagatttctaacatgagaggcctattgtagatttaaggctccacatctgttgtgggtggagcagactttaactccagtcacccctttcaaggtgcacacatcctagtggacccaaagaatgtgtttggaactctccccaatttaatatgataaaattaagaaaaacacagatctgagacccaattgatcaaatgaatcatgctatgtttttcaaaagctgtattttaagcatatttaaagaaatcagaagagaattctaaattaaaaacaatagcaaatatttagatcatgattacttcgaggtggacacatcaccaaaaaccttattatgtacattgtaacaactaaatctcccaacactattttctagataagcaaagtgcaatgcaaagatgttgagcccaagatcacaaagcttagaaataccaggacctaaataagttttattgcaggactcatctcttaacaaaatttttaatttattatctctgtgctcttactttcaaataagtaattgccccgatgagtttaaatagatattttatgatttagttaagtaataaatcagtattttatttcttgcaactcacaaaaggacccctggggcttctgcctttcaaattttgctaatggtttccggtaactcctacatgtttaataaagaaatgccttaaatgttttggtgtaggaaacaaatttcagtttaaagtcaaatttaaattttataagtttttgagggtttaggggaaagaaaactcaaattgctttcctaaagctaagagcaacttggaattataagtaataattttttaaaagaaatgtataagccatattctccctttttgttctcctcaaagtcaaagatttcattgatgataaatttggagacagtgtttccctgtcacatgacacaattcatctacaatgctaaaaaaggaaatctattaatctaaagttaaaaggttggagtccaaaataaacaaaccacccttcttttttcaaagcacttgttattcatattagagccatgcagaatccccaagatctgacctagctgttgtcaggggtgcggggtaacattatttttccaaattcactctctgtagttaaagcatcacctgatgatctccaacagttttcaatctcactcattttattaaacttacccactccagtgaggggggaggtccttctgtgtatgtttatcttattggttgttgaataaagtactgttggccaatgaagaagcaagttagtcaggactaggagtcaaggaggattctgggaaatgtagtaaaaagaagtcttgtgataaaggcaggaagtgacatagcaggcaggctagtatataagcaagtacaagaaggaagtcattctcttgctcttcctcctgctctcttctctggagccaccaatgtaagccggacaagagaggacgcattctgctggcgtcctccataaggtaagtcttatgactatggtcgataattaagactgggctagcacataagaaatcctagtcaattggccggcagcattgtaaactaatataagactctgtgtgttattctgggtgcccatgtggcggtggggctggggcagatggaataaagacttattgttacactccactacttctttctaactccctttgatacctattaaacactccctcccagctagaagttctctttttttctattgttactattgctaataactcactgaatccagttagtgctgaccatgtatgaatagatgtaggggccatccacccatgcatggacaacccaccaggaaccagacctccaaaggaaagtaatccttgccctctcatcacccatcaatttccaatagctcctcagctaggggtggacccttgagagtcctcccatatcagtgccaaaagtttgattgcttgatatggaattttgtgtagtcagtctcatgtgatgagagccaatgcatacatcagccatgtcatttccatgaggcagcattttgcagctcttttccccattctccatctcctatgctctgctcattcttccacagtattccctgagccttgaatggggtaaggttgatatagatcactctcatacagatgaatacttacagtatatttgaatttcaatatttgaatatttatataatatttattctcagcactttgatcatttatgagtctctgccttatctactaactactataaaaagaagcttctctgagaaaggctgaccagaacagaaatctatgtgtataaaataaatgtaaatattaagaaggtactttgacaaaatgatcatttagctaatgagaccagtaagctcaaccaaagtacctatgctgtcacagccatggacaataccagccatgaaatctctcctatagattaggcttctaatccaacccatatccactgtgccactattgcaagtgtagttacaacttgctgaccaattggtattatagagggcaacatccagagctgagtaagaccactgatgtcttttctcttctagcagttttcattaaacattccagcattatgaacgataactgccagggagaaagattcctaatcaggtttgtgattgatttcttgatatcctgcaaccaaagtgggtggtggcatcagccacagggtcttatcatttagtattgtgagtaaccaaaagtaatgtccatagctctgtggctttgggtgccatgaggacttcctggtcaataactcctagggaggcatcttaaggctgctgcttagacttttagtaataacccatacattctggtactagaaaaaatgtctctggtcaatcaccctttaaatctattgtaaattaccttataacctctaataaactaatgaatttccataatgcatcttcataatttagatttgattaacccactccttaccttcttgctcaatcctatccccctgccctaatcaacagttaaaactttaacctggaatattatgtgacagttttttcatgtcacttgttttttattatcccctctaattacatttttaacttagactcccatatagccttttcttacactcttcattttttaaaacctattcctgtgcctttatttccccttccccattgcctaccatatttgaaatttttgccccaagtactccccctatctactttaatttcacctattttttactacctacaatgccttaatgggtctgtctgcaatggtgcagacctcacttctgatttctgatagcataaaagcaattgattattcctcaatttccaaaagactttatctactcctgagatgtgcaagagctttgttgcaaatgtctttgagttagtagagaattgatcttggtctagtttaatgccctttatctctacatgatctgaacaaattgaacattttaaagggagaaaatggacagaggaccaaaagcaatagcagtttatccattccatcatgctcccattctagtcacagcacaaaatatgccagtgagacaggcttttcattccctaaggcaaaggtgctaatgatgatgtaataatggttctcccaattatacttaggcttgctgagtgcttagtggaaatgtgcttgtttagggaaaattataagaatggcattgattctcagacaccagaaatacagtcctttcatggctgattcactctcttagctgcccaacctgaatccttttttcatcccattagtgtaggaaaaatattttatttctccctatcttaattatccaactgctgttgaaaggaggctcactgatgatttgttcaaatgttttattctgctttgaaagaccaattttatttaatggtgaaagtgaaaaacatctgtgggtgggacatggttaaatgctctattttcctggcatccaaacacaagggtgttatcaatcaaaacacatcagcatgtaaacctaaatatgtagttaggatccataattacctttccgtgaggtgtgatagaagtatctctgcatagggaatatttaggagcctctgctttgttctaaagcataaactaagggcatatataaaacagcattctgcatgagccaaagggccatgtgcatccttactttgaggaccacaaaagttcatcttcccaggtgtctgtgtttcatgaaggaggaggatgttcatagtagaagaggcttctcctgctttccaagagcttcaagatctgaagagatggctgagtggttaagagcactggctgctcttccagaggtcctgagttcaatttgcagcacccacatgggatatgatattctcttctggtatgtaggtattcatgcagataaagcattcatatataaaatacataaatagacaaatctttgatggatgtggtggcacatgcctttaatcccagcacatgggaggcagaggcaggcagatctctgagtttcagggcagcctggtctccagagggagttccaggacagccagggaaacacagaaaagccttgtcttgggggaaaaaagatccattctcacttgcaccagactcactttgctactggagtcctaccagtcacttcttttctgctaaggcattctaagaagatggatgctgtagtggcatctgttgatatctgtagatatctgttgatttaagtgatgaagaagatgagaagtccagctcaaccatgatttgttctgagccttattcacctcgtgacgaagataggctatataataactgccaccattcactgagcgccatctaggtgtcatttccagtctcggccattgttggcaatgtttcagctatgccttagaaacaacctagatgaccctcaaccaaggaatggatcaagaaaatgtggtacatttacacaatggagtactaatcagctgtttaaaaaacaaggacaccaggaaatttgaaggcaaatggatggaaatagaaaaaaaatcatcctgagtgaggtaaccagactgagaaacacaaacatggtttgtggatattagttgtaaaataaagaaaaaccaggctgcactccactaatgtgggaaattaccagtacagagccaggtaaaaatacaagggaatttaatagggaaaagtcttacttacagagtgacttagccagccagtgggcagcagtaagtacagcaagccaaagatgaaagcgaaataaggggcctccatgtgagcatccctcactcttaaaccttcccaacgtcaccctgaccatgccctcgcaggcatggctacaggttcccctacactccatagcctcagagaggctaggtagcaaggagggttcatggtgggacacccagatctccctgggaaggagaaatagaagagattttgtgagtggactgaaggcattggaatgggagattagattttgggggcaagaaggggagagtactgaattagactactggaaagggggcatttcaaactcaggaacaaaaataaaactatcacaagagaatttcccaagaatctacgaggaagattgcagcttagtctcctagcaatagcagatatgtggcctgaagtggtcatctcctgtggtaagattggtgcctagtcgaactgtcatcagagaggtgtcattcagcaactgatggaaataaatgcagaaccacagacaaacattaggcagagttcagggaatcacacagaagatggggagagaggattgcaggagccagaggggccaaggacatcacaagaaaactcacagaatcaactaagcagagctcatagaggctcacaaagactgaaccaacaaccagagagcctgaacgggactaatctaagcactctgcatatatgttacagctatgtagcttggttctcttgtgggaatactaacagtaagaacaggggcagtgtctgattcttttactggcatttggaactatacttctcatactgggtcaccttgcccagccttaatacatgagacatgcttagtcttactgcaacttgacataccatgttttgttgatactcataggatatctgccctttcctaaacagaaagagaggaatggattgggggagggaacagaggagagatgggggagaggactgggagaattgggggggcaattacagctgggatgtaaaagatagatagatagatagatagatagacagacagacagacagacagacagacagacagacagacacagagatagatttaaaaagggaaaagaagaaacaactcagtggggtttttgttattataaatacatcctacagcaaaacacagagaattaaatgactcatcccaggacatactaccagtcaccaaaggctgggaactcaatggaactcaggtaagccaactctatagatggggtttttgtgctctatcctctgtgtggagtggattttttctaataaaatcaactagattctgaaacactgtgctccattctttatttagacttgagatgattttctttcttccttttccagaatcaccaggcaggcattgttttcccctgcagatgctagttttcactctgccccccgactgagccccctggctttctccctgctggctaactgcacctgtactttggcttccccagccttggataatctgtaaatacatattcagtggaactcagcaaccattttgttagctgatgaaatgcattttttcaacctggaaatttgttctgttcaaaagggctgacgatgctgcaaagatgtcttattgagtgaatacacatcttgctctagacctgaaatgtccagcaaccactgaatgaactgtttcccctccagttgaaatatttaaactgctttgcagtgtgaattgtttcttcctccatggcaaattcgagattagtaaaagagataattatgcagatttctctattagatttcttcaacctaacagattctagacagcacttgtccatcatccaccatagagaaaacattgatttccttggccaggcacgcactgggcagacatttttgattgagttgcactgtgttacgaatgaaactgaataatcatgctgtatggtgcgactctcacaaagtccccatcccgaactgattgtcagtctttcacttacccgaggctcatgagcagtatcagagtattccaggaactgagcagaatgctcatgggatccattgatgactgtctatttgctggtggggagatgtgccagtaagcatttgtgtgggttggaatgctttcatacataattgtgaagcagttacaaccccagggtctaattctttccaatatcaagaaacagattttaaaatctcagtatgtatttagagttaatggacacagatttgaaagacccctttatatttaaaaatctataaaagtaaaaggaaaatgtctgaaaaaaaagagaatttttaaaaggagaaaaacagcaacatagccaaggtctgtgtgaatgtactttcacttagcacccactttcctctttccttgcaaagcctgggttatatatagtccaacctctcctataaacaagttcatagttttgaccaaatcacctcatggattagcttttgtttatttttaagaggtggcaaaagagttaaaaataactcagacacgtgtttttaaagtcttctgaaaaaataatttagctgtatatacatctgtccatatgaatgaatatgtccacagaggtcagagatttgggattcctgtggagcctgagttactagcagttgtgagccatccaacatggctgttaacaatcaaactctggtcccttattaagagcattgatggtcctatccgctgagtcatctctccagccattcaaatgacttttatatccttgcatatctagaatatctatgtttcaatccttacttggacaggtatcaacacggtgactttgactaagtgtatattctctagctttgctaacaaatatgcctacagggcatggaaggaaagagttatataaataatgcacacacaaatttaggacaattgttctcactaggacaaatgttgacctgcttccctgaggactcctttgcaacatctggttaatagaggtaaggtacaatgcttaccatcccccttgcaaacatggtaagaacaaatcctaaaacaaaataccaaagtgacaaaagtccctgggcacatttctggctcattttaatgagcaaatcctagcaatactagctactgctggccctaaggatcatcaaattgaaacaagtaaaaaaaaacagtctttaagcatataaacaccctttgtgtacacattcatcaactggaaaagcagtgttcttggacttttcgttgacacaatcagaaaaattatgggcctggcacaaggtctgagcgttcatatccaaattctgcagacccaatccaccattatatcccaaatctaaatttagttaaatgacataagactcttaaatttgtccaggattctataaacctaatggcaaagggttccaaacttagtgtgcattaaattttctcattttccaaatttataatctactgtaggtcaaccataaaccatttactcccagaaatcctgtgtattaattacctctttccaacccagtgcactaaattaggttataattattagtcacacttgcagattttatttggactccaactgcagccaacacaaaacaaatgcttggaatgcttatgaccacttaaacttgacagaattctttttaatattcagtagatatcgttgtataaaagctgaggactgtttgttttatgcaaattgtaagaaaggataacctgtcaaatattgagtgtgtaattgctgctgacctcccacctaagagaaggcaatattacttgaaggtcagtaagagatcaactggtcctagagcatttttccaaagggccagaaagaccatctgcaacatgatttcttgtggtttgtttgtggtatccttctaagcctgggaaggagcacaacaaagggataagaagaatgaagcttggacctacatagatttgatggcttatccaccatccctatccagcccatctacccacaaaagggctcagaggagattaagactcaatatctcatttgaaaactgcattttaggctgctgctatctctatcacagagttgtgattaaaaaaaaaaaaagcaaaaaagcaattcctaggaccaaggaagtgctcaataaatgttgtctgtgactattgcatgtgtccatttagtttaccactgtaattggtcaccaggacaattttacttatagacattatgggttcaattaatggttattgcttgattaaaaagaggtgactggccagttgggtgaccttgatcaatgtattcaaaccctctgtacctcaatacattcatctacataagaagagggctcttgtaaaaattaaataatgtcatgtttcagtcaatgccttacataaaacatttgtgtaatgattaatattggatgttagcattaaaatccataccattgttgcagtgtctaccttgaacaagtcctttcagtctcagccttggtttctttatctaaaatcacagtcattgactgaataccttgagtggaagtgaagaaagttgcataagcaatgctgaggtcattccaggatagtgtgataaatggagaagtgggcaaagaagttgaaagtgtttacagaagactaatcccaatcatgagccatgaagcaaacacagacagaaaatacagaaaagaaatgctgccaagtatgaagtgacccacctgcttttagctgctgttaaattgctagaaaaaagaaagaggcaataacagaatgcttgaagtaagttttccacagatatacgagagctactttagccagcaacaacaaagacaaaaaaaaaaaaaaaaaaaaaacagatgcttaagcctgagagatggctcccagagtaaagacacctgccaccaagcctaacaacttatatttgttctaggtctcacagtaccacatagtggaaagaaagaacagaccattccaagttgtcctctgacctccacacatgcacacacacacacacacacacacacacacacacacacacacacacacactaaaatgtagtaaatgtgccatggaatgaatatactttgagcccctttttctaggagtcattaagagtttgttaaaaaaaaaaaaaaaagattcaaccattaccacacagtttcattatcctgctgacatgcagattccatactgcttctctattattcattcagtaaatatttattgagggcccctcattgttagacatgttttatattcttggaagatagcaccctaatttccaaatgtggaatttccattttagaggtttaccaaattttatgaaccaaatgaagaaaaaaatctcttccagcatgtagtttacattccaaaggagaatctgtggaaatcaaacacaagttaagtacattatacagaaaggataagggttgggggggggggtgtctaatttgaaataggatggtcagtgtaagtttcacttacgtgacctttaaggagaagtcaaaacactaattcaactctgtgttctcttgcagaacaatctacgtttcccagggaattgtctccctgcctcactacgtaaggcttccttctacatctgtgcacttcactgatcaagaacattgccatctgttctttcttgtctgagcaagatttcctccctagtatgacaataagataaccatcaacaaattgtcccaagagaaatccactatgtgaagataaaaccaccatgtgaaacccagcacactgaactcacattttctagtttttcaggataaattgagcccttctgttagagtaggaccagccctggagccatcaatctggcactaatgaatcacttctcttctaagtgaaaaccactaagatgtccaggctccttgtcttagttaagcttactattgctgtgataaaacaccatgaccaaagcaagttaaggaggaaagggtttattttgcttctgtttccacatcactgttgatcactgaaggaagtcaggacaggaactcaaaacaggacaggaacctgaaaacaggaactaatgatgcaaaggtcaagaaggagtgctacatactaacttgttccacatggcttgttcagcctgctttcttataaaatccaggaccaccacccacaatgggctgggcccttaccccatcaatcactatttaagaaaatgccctacaggtttacctacagccttatcttatggaagcattttcttaattaaggttcccctcctcttagatgactttaccttgtgtcatgttgacataaaactatccagcacacttctgtaataagatagctaaatgacaggatgccctagtatgtaagaactacccttcaggatgagactttgtctgttctcctggaactctgtcacccctagaaaagttttgagtcaggtgaccattatcccagaggcttccatagagccattccaggaatgaattctgggaggatctctgagagatcaatgagggaggcatctctttgacatggcattcaagaaagaagtagatctgagtcaataggtgacaagctgtagtgtcagaaatgtccccaagcctgtttccctgatggtaagaaggcatcctgttcaatggctgctcaagttaacaccagatagctaagaggcctccaaaaggaacaattccagccacagccaaagtaataaattaatcatattaagagatttctccttcttaataaattagcttacttgaaaatatgataaacatccttaagacacatattttgaggccattgaaagaaagaacaaacatctatccatataattttttaatcaggacaaacaacacagctagataagtcaagtccctaaagacttaattgtgcttacctcacgggcaattaaggaaagtgtttaaatagtttaaactagatcttacaatatttacataattgtcttacttcttagctgtgctgtcacactagggctagaggaatttttctttttggattggagagactcttggttcattcaaataggtactcttgagaaacaaggctcaaaatgaaagtgattaaaaactcacaggccaaagtacttttcaaggatcctcaatacaaactgaagattctagaagctagaatttagatctagatcatttcgaggcacttttagataattgtttaggatctggagttcccattactttacaaaatcctatagaatctgttggcagttttccaatctgaagaagatgaattttagatatttctaagttttaaaaatatattaaaatgcttcttttatttgaaccaattatttaaactaacacaagcaaatggcttaaaaataaacaagcaggactgtttaaagtttgtactactacaataaaatccctgaggcagctaaccaatagcacagcttagcctcagaaactggcacttggctgcatcccctaacatcatggaggtgaatggtctcagcacacagaacaggtaagcaattacactctcaaccaagaatacatacagagtgggcttttaaagtccttttaaacccatcattccccgaggatctcccactaggattttctacttaaagtccatgacacctccctaaaccatgaccctgaagactaaaactttaaatgtgggcctttgcaagctactaaccaaattgtcacttcccttttggaaagcatgctgaattaatacaaacctagacaaggctcaacgatgacttatactagtggttctcatcttcttggatgacattggttccttttagaatctactagatgatatgtaacatctcagaaaaatccgtgtatgtatggtttcaaatgactcaaaaaagtaagagattccacagaatatcaatgcatatgttcagaccaatctcctctctgtttaatttaccttatttgaatgtactaccagagatttgagtccacatccttgtgcagactgagatgcactctactaccactgaacttgaaattcagactccctctatttttcagattgcaaaaaataatgtagctcacaataaaagaagggctttttcaatgccaagcaagtgatttaacataggaaggcaagagtagcttctatactgttaaaccacacacacacactctgttttgtttttgttttttttttgttttttttttttttctcattcactgtgtgtgaataaggggagaaaaagaaagaaaaaggaaaggaacatgactgctcctaggtacagtagatgagaaagttctctgtagatatgagagagatcatagtcagaggcagagatatctgtaagggtccagagttgtgatcagcttgagttgtgtcatgtgatatgggagaggtgaagacagaagaaccaggtgcagcatccagggcccaaaagagaatagacaaaaggggcagataaccaaagggatggattatatatataggaaagggaagcccaagccctgggctggagaagtttaggggagggggaggggcatgccagccaggcaggctctttaaaaaaaggtatgggctgagggatgcagggaaaacaatgggggaggggcagaatctgctttgatatgttaaataggcacttcagtcatctgtcctggtttgaaacctaacactgtgccacatcttctccaagaagagatgacaaagctaaaatctctcataattctccactttccctcatttttactgaaaactacaagcatatagaatgatgtttccattgctgacataccacaggccaagtaatttatgagggaaatggcttttggttaatttccaacatcaccacgtggaaggctcagggtagtcctatagtaaacaggctgtctgacattaactacaaaactatgaaaatatttcacaaagactaggatggtctttctcaagcttatgtgaacatgaaacaaaaggatgcttcctaattatgtttacatgcaatattccaagggatggcaattggggaaacactccaattagtacacaggcctatgtgtcattccttgcatcattttagaaccttatacatttggcaaaagtattagtatataatcttataacggtcataaatcaaacctttattattgttgtgcttggagagctccagggtccaaagtggccatatgtcacatcttttggcaaacccttccctaattctcctcacttgggcctcagacagattattccttcacttctgtggcagtttcactcatgtactcctgtgcaagaatctcagaaagtaatggctgaaaataatgtgctattatttctttctattttggagaggttgacagaattcagttttcttaaggcctgcctgatgggggaagaccttctgtgtatatgtttgtcatattggttgataaataaagcactgttggccaatagggaagcaagatagatggggctaggagtcgaggaggattctgggaaatgttgtaaagaggagattcatcatgtgatcacaaggaagagaggacgcataaggccggcgtcctcggtaagataagtctttacaaaatatatagattagtagttatggttgataattaagactgagctagcatataagaaatcttagtcattggctagcagcattgtaactaacataagactctgaatgttttttggggaccctagcgtggcggtggggctcaggcggctagcagtaagagttatcatgacacctggcatattcttgttgtcagatagcaattggggctgtagtcatctgactgactgcacttctgaaattctgctcttactcaaatgaaagttgatgaccattgtcatctgaagctcagccagagctatgaagcagaatacctagctgcaatttctccagtagacttggggtttcctcttaaaggcagtggttgagagctgaaagggaacatgtcaggaaccaggattctaagaaatgcagttgggagggcttcaatgggctacaacttagaaaccctagaacatctcttcccctgcatcctatggggcaatcaaatcactagggtaagctcatatccaagggaatgagaaatcgactctaactcttaatacaacagcagtttttgatatcatgcctaccaaaacatttgttacttcatattataaaacctatttactggaatgtattgctatagtttagatttgaaatattctcccaaaagtcccaggaatcaacagcttggtttccagattatttcagtaaaaaaccttaaagtggtggtgcctaattcaaggaagttaggccactggaggtgtgtccttaaagattttattaatcaagggtctcttgagcagcggttttcaacctgttggttgtgacccctttagcaaacctctatctctaaaaatatttacattatgatttattacagtagtgaaatcacagctatgaattagcaacaaaaatatttttaaggttggggtcaccttaatgcataaggaactgcattaaagggtctcagcattatcaaagttgagaaccagtgctctggaggaccagaaccaatagagtttgtatttgtgtgttgtgtataatattataaaagaggacttactaggtgtaacgtatgttctaataggtcttaataataaaaacctgaagtcagatataggggtgaaagctgaaagatcagagagacaaaggaacaagccacagccacaccttacctctccaacttcccagctgaaaagacagcaagttcgtatttcctctctgctatatttttctcttacccagccatttcactttgtatctccacatccctaatgctgggattaaaggaatgtaccaccatttcctggcctctatggttagctagggacaagctccactgtctgatcttaagaaacactttatttgtacaaacaaggtatcaccacacctaggctaatttatacaatggggcccaagtagtcttacaatggtatctgtatactagagagactaagaatctggtagctgaggctggtgaaacccacagaaacagctggtctgaacaagagagagctcttggtctccagactgatagctgggaaaccagcatgggactgatccagaacccctgaatgtgaatgtcagtaagaagaccttggaaatctatgggaccccttgtagtttatcagtacttacccctagcataggaatagactttgggtgcccatcccacatggagggatactccctgagcctagacacaagggggtgggtctagaccctatcccaaaggatatgacagactctgaagaccccctatggaaggcctcaccttccctggggagcagaaagtgtatgggataggtagggtgttagttggggggtcaaggaaggaggggagtgagagggaacagggattgacatgtaaaataatctttctaattcaaattttaaaattatatataaaaaagaatctggtagctgctcagcctttaaattagttgccttagtagcctcagtggagtactgaaggcctggaagatcttggagagtttctttcatttcctggagagtcttcatttcacattgacgagccaaggaagccggagtgttagcaaagaatagcagctacagcaacaggaatagaccactgtactcaccagcaagaatgaagccagtcaggtaagcagcattatttttcctgcaaacctctgtatctggaccatccattttaaggtgccactcattcaaagggaagcaagaaggggaatagaaggtgtaccaacttaagctcattataaggtcaaaaggacatgatcctttgcagaaagaagggaatgattttaggaaaaaggagaaatatatctactggcagagaaaggaaggaggaaaagttttcaagaggtggggagaagcttgtgagaaaagagagaaataacaggaatttatacttaatatggtgggaaaatctttttgtacatttgaagatgtgttgttgtaattggtttaataaagatctaaatgcccaatgggtaggcaagaagaagttaggcaggactttaggacagagagctcactggaatgaagaagggcaaagtcaccagcagatgttgggagaaacaagataaatgtccttgctgaagaaatgtaccaccacatgatagaatgtagataagaaatatgggttgaaatgtaagagctaggccctttccgctgcgactcatcacagaccagggaggagctccctgaatctgggtataggccactcttccttccatttccgtggaccgatctgccaggagagtgaggagactacgaggagaggcaagaccatccagagcttcggacattgaattcctggcccacacacactacagtgtaacaagaggagatagggagatcctacctgcactcactggaaaaagatatgggaagaagacagaagaagaactcactcaacaacagaaagatcaatatgacaccaccagaatctagggactccaccccagcaagacctgaaaagcacaacatgttgcatgaagaagagatggacctcaaaaattatctcagcaagatgatagagaccttcaaagaggaaacaagaaaatcccttaaagaaatagaaaaaaaagcaagcaaaaaattacacgaaatggaggaaaagacaaaccaaaaaattcaagaaataaacaaatctcttaaagaagttaaagaaacccaaaataaaacaaccaaacaagtgaaggaagctcttgaaacagttcaaagcatgaaagctgaattagacacaataaagaaaacacagaatgaggcgatgctggaaatggaaagactggataaacgatcaggatctaaagacgtgagtataactaatagaatccaagagacagaagagagaatctcagctattgaagactcgctagaggatatacattcatcaaccaaagaaaacctcaagtccaacaaatccctaacacaaaatatccaggaaatatgggacactgtgaaaagaccaaacctaagaataataggtatagaagaaggtgaagaaacactgctcaaaggtacagaaaacatattcaacaaaatcatagaagaaaacttccccaacctacagaaagatatgcctatgaaagtacaagaagcttataggacaccaaacagactggaccacaaaaagaagtccccccgacacataataatcaaaactccaaatctacagaataaagagaaaatattaagagctgcaaaggaaaaaggccaagtaacatataaaggcaaaccaattagaatcacacccaacttctcaatggaaactctgaaagccagaaggtcttggatagataccctacaagcactaagggagcatggatgtcaacccagactactgtacccagcaaaactttcaatcattatagatggagaaaacaagatattccatgacaaaaacagatttaaacaatacatatccacaaatccagcactacagaaggttctggaaggaaaactccaaccaaggaacataactacatgcacaaaaacacaggcaatagataatctaattttgccaaacacaaaaagaagcaggagggcaaaaaccacacacaatgataccaccaacaataaatccaaaacaaacaagaaccaacgaacaatggacattaatatccctaaatgtcaatggtcttaacttacccataaaaagatataggttaacagaatggatacgaagacagaatccatccttctgctgtttacaagaaacacacctcaacttcaaagacaggcgatacctcagagtaaaaggatgggaaaagattttccaatcaaatggcctcaagaaacaagccggtgtagcaatcctaatatctaacaaattggactttaaactaaaatcaatccaaaagagatgaagaagggcatttcatactcatcacaggaaaagtccatcaagatgaaatctcaatcctgaacatctatgctccaaatacgaaggcacccacatttgtgaaagaaacattactaaagctcaaaccacacataaaaccacacacacttatagtaggagacttcaacactccccttacaccactagacaggaccaccagacagaaacctaacaaagaaacaaaggacttgaaagaagttataacccaactggggttaatggatatctatagagcattccatccaaactcaaaagaatataccttcttctcagcaccacatggcaccttctctaaaattgaccacatagtaggcaacaaagcaaacctccatagttacaaaagaattgaaataaccccctgtatcttatcagaccaccatgcattaaagctagaattcagcaacaatacaaatggcagaaaacctgcaaacttttggaaaatgaataacacccaattgcaccattcctgggttgaggaagaaataaaaaaacaaattaaagacttcctagaatctaatgagaatgcagacacaacatacccaaacttatgggacactctgaaagcagtgctaagagggaagttcatagcactaagtgcccacatgaagaaactagagaaaagtcacatcagagaactgacagaacaactgaaagcactagagcaaaaagaagcaaactcaccaaggaggagtagacgccaggaaataatcaacctgagagctgaaatcaataaagtagaaactaggaaaacattacaaagaatcaatgaaacaaagagttggttctttgagaagatcaacaagatagacaaacctctagccaaactaaccaaaaggcagagagagagcatgctaattaacaaaatcagaaacgaaaagggggatataacaacggacactgtggaaatccagagaatctttaggtcatactttgaaaatctgtactccacaaaattcgaaaatctaatggaaatggacagtttcctggataaatatcacttaccaaaattaaatcaagatcagataaacagtttaaatcgacccataacctcaaatgaaatagaaacagtcatcaaaagcctcccaaccaaaaaaagcccaggaccagatggcttcactgcagaattctaccagaaattcaaacaagagctgataccagtactcctcaaactattccgcacaatagaagcagatgggatattgccaaactctttctacgaggcaacaatcactttgatacccaagccacacaaagataagactaagaaagagaactacagacagatatccctcatgaacatcgatgctaaaatactcaataaaatattggccaatctaatccaagaacatatcagaaaaatcatccaccacgatcaagtaggcttcatcccagggatgcaaggatggttcaacatacgaaaaaaccatcaatgtaatccaccatataaacaaactgaaaaagaaaaaccacatgatcatctcactagatgctgaaaaagcctttgacaaaatccaacatcccttcatgataaagatcttggagagaacaggaataacaggaacatatctaaacatgataaacgcgatatacaccaaaccaatagccaacatcaaactaaatggagagaaactcgaagcttttcctctaaaatcaggaacaagacaaggatgtccactctctccatacctcttcaatattgtacttgaagttctagctagagcaataagacaagaacaggggatcaaagggatacaaattggaaaggacgaagtcaaactctcactatttgctgatgacatgatagtctacataagtgacccgaaaaactctaccaggaaactcctacagctgataaacaccttcagcaaggtagcaggatacaaaattaactcaaaaaaatctgtagccctactgtatacagatgataaactcaatgagaaagaaatcatggaaacatcacctttcacaatatccacaagcaacataaaatacctgggggtaacactaaccaaaaaagtgaaagacctgtacaataagaactttgagactttaaagaaagaaattaaagaagataccagaaagtggaaagatctcccatgctcttggataggcagaattaacatagtaaaaatggcaatcctaccaaaagcaatctacagattcaatgcaatccccatcaaaatcccaacacagtttttcacagacattgaaagaacaatactcaactttatatggaaaaataaaaaacccaggatagccaaaacaactctttacaataaaagatcttctggaggcatcaccatccctgacttcaagctctactatagagccatagttctgaaaacagcttggtattggcacaagaatagacagatagaccaatggaatcgaattgaagacccagatattaacccacgcacctacgaacaccttatttttgacaaaggtgctaaatccatacaatggaaaaaagatagcatcttcaacaaatggtgctggcacaattggattcggacatgcagaaaattgcagattgatccatacctgtcaccatgcacgaaacttaagtgcaaatggatcaaagatctctccataaacccagccacactgaatcttctagaagagaaagtgggaataacccttgaacaaattggcacaggagaatgattcctgaacatcatgccagaagcacagacactgaggtctgcaatcaataaatgggacctcctgaaactgagaaccttatgtaaggcaaaggacacagtcaggaagacaaaacgaccacccacagaatgggaaaagatcttcaccagccccacatctgacagaggactgatttccaaaatatacaaggagctcaagaagctagccaccaaaacaccatacaatgaaattaaaaagtggggtgcagaactaaacagagatttttcaacagaggaatctgaaatggctgaaagacacttaagaaagtgctcaaaatccttggccatcagagaaatgcaactcaaaacaactctgagataccacctcacacctgtcagaatggctaaaatcaaaaataccaatgacaacctatgctggagaggatgcggagaagaaggaacactcctccattgctggtgggagtgtgaacttataagaccactttggaaagcagtatggcagttgctcagaaaaatgggaatcaacctacctcaagaaccagccattcctctcttgggtatatacccaaatactgcatgtccatgcaacaaggacatatgttcaaccatgttcatagcagcattgtttgtaatagccagaacctggaagcaacctagatgcccctcaactgaagaatggaaagataaaatgtggtacatttatacaatggagtactactcagcagataaatgaaatggaatctcgaaattcgcaggcaaatggatggaactagaagaaactatcctgagtgaggtaacccaatcacaaaaagacaaacttggtatgtgctcactcatatatgatttttagacatagagcaaaggtttaccagcctataatctgctttcccaaagaaactagaaatcatgaatgactctaagggataaatggaccccaggaacgggaagtggcatgaactccagagctaatcgagagcatgagggtaggggagtgggtgctgccacaataagagcacaagaagaagagtagaggagaagaaatggaggagcagatatattgagttgggggaagaatagaggagagagagcaggatgagagataccatatcagagggagccactataggtccgagaagagatatggaactagggagatctccagagacctacaaggatgacacgatctgacagtccgggcagtggaggagaggacggcctagaagcccttcccctagaatgagattgatgactactctctatgctatcctagagtcctcatccagtggctgatggaagcagagacacacatccacagaaatacactgagctgaaatcgggaacctagttgaagagagggaggaatgaagaatgaaggggtctgtaccaggttggagaaacccacagaaacagttggcctgaaaaagggaaagcatatcgaccccagacactctttgggaggccagtacgggactaatatagccccctgatcatggatgccaatggggaggcccctgcattcctgggagcctccggaggtggactgatgttttgccctggtgtgtgtgggggggactatgagagcccatcccacttgaagggatgcgctctgtctctggacacatggggaagggcctaggcccagcacaggaagatttggtggacttggtggagccccggttgggggccccaccctgcctggggagtggtgggtggatggggtgggggtaggttggaggtgggggagaaggaatgggggtgaggggagggagagggagaggggaattacatgtgaaacaagcctgttccctaacttgaattaataataataataataaaagaagaagaagaagaagaagaagaagaagaagaagaagaagaagaagaagaagaagaagaagaagaagaagaagaagaagaagaagaagaagaagaagaagaagaagaagaagaagaagaagaagaagaagaagaagaagaagaagaaaagaaaaaaagatgtaagagctagttagtaacaagcctaagctattggccaaacaattgtaattaataataagtctttatgtggccacttgggagcaggctggtgggacagcattttctgttttcacctagtgcttgatctccaagagctaagtaaaatagcagatgaaccacttgtgaaaagagtctgaatgagggactgtctgccttgggttggtctgtgggtatgtctgtgcccaattgtcctacttaagttaattgatgaaggaagatacatccaactgtgggtgaaacattccctaggcaggatgtcccaaaccaaatataagtgaaaagaatagagctgaacacatgtgtgcatttattgctctctgctcttgattgtggatatgcgccaactaactctatggagttcctgccctgacttttcattatgaagggatgtaacctggaattctaagctgaaataaaccccttcttctgtttcttttcttttcttctttccttttattgaaaatggattttttcttaatatcttctgattgcatttccctctccctctattcctcccatttcctctacaacacccctcccattgggattcattccctttctttatctcattagaaaacaaaaaggcttctaagagataataataaaatacaatatagtaatataaaaacaaaattaacaggacaaatagaacaaaacaaacaaataaaaggaaaagagacccaaagaaatagctatagacactgagacacactcatttgcagactcagaaaccctataaaaataacaaactaggagccatactatatacaaaggaactgtagggtaaagatagatagagaaatagagagagagagagagagagagagagagagagagagagagagggagaatggtgtgtgtgtgtgtgtgtgtgtgtgtgtgtgtgtgtgtgtgtatgaaaactccaacatgatgttatgagtcaaggaacttccaaagatgctggagcgtttattgtctattggccatctatgttgggaatgcagcctaaccttaagagtagtttccccagtaagactcccttggagaaaattaaattttcatttgcaagtagttattggagacagcttctgggtaagggattggggtatgtgttcacttctcctttcagctccagggttttaatttatgaaagcaatgaaaacaaaactggaacaagctgtaaatgtgcatattttatttggtaatttattgacactacctaacattgtgcaaagcattggcccattttgttgaaggctggtgtttctaaccagtggtggaatgagcacaaaactccccagtctgaacataaagtttctttttaaaaaaaaatcgcattattcaagtgatattacttagaagtaaagtgggtttgcaaaatgtaacctgctactacctatcattcccactcccaataatttccatatattaccatgacaccacagagagtaaccacagcaagagcacaggaggtggagtgggaggaggtttaggatttgattagcaatcaatgacactttgcaagtaaaatatatatactaagtttttccttctagaatctagagtcatgaaaaaaaccttttaaacccctaatgaatttattccctttattttctaatttaaagttttaattaatgtctctctcattttcaaatatccataatgtcagcagttagcttagaacatgattacaataattattccatcttaagaacaactacacatcaactgttcctttgtgtttaagttacagaatttaaaaaatgtttttgctgccttgtttgttcagagtatgaaacttatttcaaaattgcattggaagtgagaggaaaatacagtcatttttagccaattgtgaacatggtagtagaaagacctggccctgagagtcattctatcaagccaaagaagcatatcttaacacaacttcatggagctggaataaaagaagaataatgacaacagaaactcagctaattgtcataagtcacataggaagttaatacatggccatgctcaactatgataaagtggagaaaaatttaaaacaattcaggaagagttatcacattgttcaaattatctctttatgtaagtgctggtctagtctttcagaattttccaaacaacaaaaaaataatgaaacaaaaaacactcccccaccagctgctggatgaaggctctaggatggcatataagtcagtcatcaatctcattatcaggggagggcatttaaggtagcctctcctctgttgcttagattgttagttggtgtcatctttgtagctctccagacatttccctgaattctcttttaacctataatggatcgctctgttatggtatctcttaccttgctctcctctattcttccccaaagtcagaagcagccagccacagctaaacactgaactgaactggaatccagtttcagagaaggagtgatgagcaaagggatcaagaccaggctggtgaaactcacagaaacagctgacctgaataaggagaaactcttggctcccagactgatagctgggaaaccagcatgggactgatcgagaccccgtgaatgtgggtgtcagtgaggagacctcggaaatctatggggccttttgtagtagatcagtacttatccctagcataggtatggactttgggagcccattccacatagagggatactccctgagcctaaacacatgggggagggcctaggccctatcccaaaagatatgatagactctgaagaccccctatggaaggggtcaccctccctgggaaacagaaagggtttgggataggtagggtgttagttggggggtgagcaggggaggaggggagtgagagggaactgggagtgacatgtaaaataatattgtttctcatttaaaatttaaaaatggagaaaaaacactcccccacacacatacacacagaatggagcccatacctatttctgggcatagagcctgccctggagtgtggttgataaccccaatgacataccactgaaaaaaaaatttcctttctcagcaggtatcaaatacaaataacttccttgttagaattgagactttatgctcacttcctcttctctgtgcttggagtttgtctgatttggaggaataaatgtgattaagaacatattgtattaaaatgtttaaataaaatattaatacataaagaatttatattacaattcaattacaatacaattcaattacaggtagcacatataatttcactacaaggtctgaaaccaatcttaaacatgaagactcagttacccgtagtttataatattatttattaccttcccatgctttaaaccatctctagattatgttgtatggatagttatttactattaaaatgtacatattcagctcacaatatattttcccatctatttttaatgcatagttattcaaatctgaggatttattatctattagaaagggccaatttcactatgagttgggtactggattggaaataaaagatacattaacagagaaaagaactgacttgtgacctcatagattttagaaactcacaaagaaatcaggtatttggttggaagaaataacatgtgtggtggaccaaatggtcacctccaaaatatgcccattccttaaatcccatacattgtcaaatactacattttgtagcaaaaggcctgtattaggcaaaggttcttgagaggaagtacttatcctgaattatcgggattgaacctgatacagccattggcatagtgataagaaagaccaactggggattaagttaacacacaaggagaaagtgaagtcaagatggagggaagaagagatggcttgacccgttaagttcttgccatgaaagcatgaggactagagtttgggacataatcagagtcaattcaaattaaagcctggtgggagggtgtaggtatcccacaagtagctccagttctaggacgttggatacagaagatccttggaccaagctggctacctagacaagcccttattagagagcctgagaacagctgggagattgtgtgtccatgaataaggtagagcatagtcaagcaggactctcaatacacccatatatgcatccaaacaagcattcacacaaagtctgcatgtcacatacacacaaaagatggagctaagtgagagccacaagccacagaataagcaacagagctatcagaaacaaaatagagtgaagagaaggtccttccacaaagactaccaaagtgtggccccaacacacactccttcaatcttctggactccagaattctgagagataaatttaagttcccaagtaatttattcctgcatccctaggaaactaattctgcacataaattacttataattatattttgtgataaatgtcaaaaaacgagtagtacaggatgctgtaggagtagtacatggaaacttttttattgagtgtattggaatggaaaatgaggaacaatatgattacagatttgtatatggaaattctgattactaaccatgatgttaaattggctatgctttgtatacataagctccaagaaatggtcctccaaacattgaagatagatagatagatggcagatgattgatagattgatagattagatgggtagatagatagatgtgaggaaggaaattatgaatcttttatgcctttatgggaaacatatcttttcactatgagaagacaatctgatgtgatttgaaataaaagcttcttcactaaagtcacagaagtgtaccagcatgacacattttaactatgcttttatatataacatgtttctttattgtatcttcatgcctgcacagattgtattttaatcatgtttacctcattaccttattttgttccctcccttctcccactgatccctttcctcactccaacaaatctttcttctactttcaagttctttgtgacttagtgagttccattaggactgcttacaggggcctggatgaggggttaattacaggagcacagctgtaggcacccaagcttacttactgagccaagatcacctgatatggctgtgaggaattaaatcagtatggttggagtggccacaccactacagaggctgtgacagttttattgagagcaatcagacttttacaccttcatcagaaacagaatataatgacaattgccagtatcaatacagttgtagttgccaggatacagtgaactttgcaagtcatctaggatacactagattaatgtctaaaccctgccctatcaagccttcttgactactaagggaacatacagagaaacacaaagtggctcgaatgcatcactgcctgaggtctctcaggaactggaagtcacattgtccctaggagtcatggattctaacctgaaaagaaactatgatgcatgactcccaaggtagctaggccaagacaactacatggttccctgcacacaggtactttactagtagctacaccactaacaatttttcgcttttcctagtaaccattaactgcctatagatccttggagaagagcagaggttcatgtgatactcatacactaagaggatgtaacaggtccggcttctgatgcttttagtaacaatgctgaatgcatgatcccaaatccagattgtagtggctggtaatgttgtcatgtatttagttcaatttttttaagtcactaaaactcttcccaaaatccaaacggaaaaaaaaatggataaccaataaaacaaaacaaactatgaatagtatcaataccatcaacttataaggaactgtataatcctagaatatggctacagggtatgcactctacaaaggccaggtaaacagcataaaaaatcagcactttagtggcaaaagaagcagacaatgaaaaatatcaatgaaggaaatcaataagacaggtgcttgcagagatggaaaaagtccaatcttactttcccctcaaagcatagaatactttcctgaggaaaggcctggctggagaatctgagacaggtcagcaagagtgaggagctttttcttctctccaagttaatgtgagggcaaatgttcatggtcatagaataaaatcaatgatccactgggttaacctctcaagctattgaaaagtatttaagtgtttttctgggcctggtggcacaagcacttaatcccagcactcaggatacagaggcaactggatctgtctgagtttgaagccaagctgatctatatagcaagatcctatctcatatatatatatatatatatatatattatatatatataatatatatatgtgtatataaggaaacagagataatatctaaaatataattgtaactagatagatgatagacagacagacagatggatagatttgtgtgtataatctataatcagccacttacaaacatgaaataacctatcacgaaccaaatttcaggagacttcagaactgcaatggaaatttcaacatcagtacataggccgatactaagtataggtaaacagagaacaaaacttaaaatggataaaagattgacagaactatgagtaaatatcatatgctgccatagcacagaagtcatgaaaccagctattggtgaaaaatagaaaataaataaatacaagatagagtaatgtcccagtttctgggccgctagtgaaatgatgccacttgaaagtaagaaatcaagtaagacatgtttattgcagatcacaaatatgaaattccaatcagaaatttgtgagcggaaaagaggaggataagaaataattaataacccaccttacaatggatcatgttaggaaaccaagagataatatctaaatgccatatggataactaaagatctatggactaaaggtattcatttagcaataatcaccataagcaatatatatcataaaacaacaaaaataacacatagcaaaacttcattgaatatgtatagggtagcacttatataacacacatatataaagtaatatgaccaactagggataaattaatcatgttttatgtataaatagtgaatcttcaattaggaatgaattcagataggttaaaaagcattttagtgttaaataaaaaacatacacaaaactaaataatgtatacatttggggtggttttgcatgtttgaatgtgaaattttgtgagtatatgtgttcatgtggtgtgcctgtgtgcacacatgcatatatgtgtctttcacagtcactctccagaatattttttgagacagaatctctcacagttttgagacagaatcacagtcttttgagatagagctcactgactgactggactgcctgaccatatatacgtcccagggatcctctcatctcttgttctccagaattgaaaaatgtaaaatttaaaggaatatacaaaggattgaaatagaacacataaaatatatgtagtaaataacccttgggacataaagacattatgattttttttagaattcttagaaaactaatggtaggaaacataccagaatctttgggatatggccttaagaatcccaagggccaggttctttcctggctatataagctaactcaccacaagatcgcgatgctgtcacctatagactactgaactgcactccaggcaaaaatactcactggtgcttctaaaactgtccatttaatgtacccctaatcaatgacaataattgaagtccaccccaagaaaaccaagggcacagaaaaccgtggttctgacagtgaagttatgactattaaatctcctgatcttcttaaatattgactgttatactctgattctattctatcatatttagattatgtcttgaatatgtcattttttacttgtttgcctggcctgtctctgtctctgtctctgtctctgtctctctctctctctctctctctctctctctctcttctctcttctctctctcttgtgtgtgtgtgtgtgtgtgtgtgtgagtgtgtgtgagtgtgtgtgtgtgtgtgtgtgtgtgtgtgtattgtgtaagtgtgtaagcagaagcaagagattagtatcaggtgtctttctgggtgtctctccatcttatattttgaggcagggtctctcactgtgccccaaactcactttttggataggctggctggcgagccagctacaaagatctgtctgtctctgccacaacctatcactggggttaccaatatgtgcgaccactccagacttttatgtggcagttatggaataaactcagttcttcatccttacacagaagatactttacccccagccatcttgcccaatacataagtcatattttttatttgaagatcctagaaagagatctttgtttatcatgtacctcccctatctttcaagttctcctgtactctttcagttccctccagtgtgagaatcaggtgcacaaataaggcctggctgcttataagttggatagaattctgtgggacctggagcataaaaagaaagagaatttatatgtgggaatataaatgctgttgtccgtttgcctcaccctggttctatcctatgtgttgttgaagtttttctcagcctccactaagccattcttaggattgctacaatagtcaatacctctaatgttcacataaacttctatgttcacatagtttgtcttcaggagagaattggattacagtgcaatctctatgcctttccttgttatcttttattctacccccttcttcaaacagtgcttctttctaactacgatgactccctcccaagtgctagtggccatttaataaagtggtatttcagtccttttgtctaattgtattttaccaataaatgaatgaagataagctttccaataatccaagaatatctcataatgagagctattcccatgcctcatgatgactggctagacagtcattggacaatgactggctatctttgggttctgttctttagtctattgtgtttcaaacatcacctctctgcttacacaaatggtcatacatgagatgtagaaatcccattcctaacccttttgtgttgcttcaggcaacacaaatgaatacatggccaagaaaaagcaatcacagtatccatgttaacagtgattggcccaagagtgtatctgactcagaccacatcctacacagagaattttgagtagtaaatgagagacaaatactattttctcatttctttctaagttatgaaactaaagccctggaaaatgccagaaggcatgatatatgctgcaaagaaaaggtcacccaataactggagaaaatgaaaccatcaagcagagatgagaggcaggcagagaggcatacctggtggtttacaactcctctgtttggttacacaatgtaaatgatttctatagtacattttctgagctactcctccttcttccagaagcatcctggtttaactttaaatagattgaactgagtatgtgtttcctgcaaacagaactcctgatagctgaacgtagtatcctgcagtgattcaacttggacaactgaaagtgttcctctctgttgatggttgggcactctctctgtgtcctcccttaggtggaggcagaggtgatggtgacaaggacaagatcagcagtcaaccaccatcatttgttgataacttagggtgtgtcaggctgtatggtaggcactcttccaattagctcctttaaaatcttcattactctactgggtaggttgctatttacatgttacagcttggtaaactgaggcattgagaggctctataacatatattcagagagcccaagcagatccttcttgtttgagaagctgggtattttgctatggctttatactgatatatatatatatatatatatatatatatatatatatatatatcagatcaaatctttgaatggttctatggttttaggctgaccctgagggattcagtggttttcctctgatatcccagtaacccccaagactggagctgctgtgatttgggtttacattttagctgccaaaaaagaaagaaatctctgactttctcagaaaatgttccacatcttttcaggttgatgatataaagtcaggtaaaatagaaagaaaattcaaatggccatattgttcacagtctaacattcttccctagcttataggaactattaaaattaaatattaaaatcctgaggtattattgtgttattcaaagtcattttttatgacaccttcttttacaaagatgaatctcaagagaatgaggaacatttggctaagttgggtttttttccctaggatgtagtaatcagagtgattttcagccaaagagatgccaccactctgaagtaactgaaaagattccaatgatttactacgtttttcatcctattcctaacgccaagtgaaatgaaaggaacaaggtaaaatggaggcaactgtctacagcttcagggtacacgctcctgcatttgtatataatatacattatgtgaccatgttgctttactacccttgctacagccaataactcaacaatggctttatgccagccaagggggcgataaatggcaggcagtagtatgttttattcagccagctaatgattctgacttcccagcctgcctcctttattactggatgtgaactgacatgccacccctgtcctgcagaacttagagtagctcctgtggcccatatggtatgttgtaccctcacagctacatgggaaacataacatacacaggactcccaaaaccagaggttcaatgacttaaagtagtccacaatagccatagctttccccattctgagacacaagttatttcttcccactactttcctaacactcacttttgttctaatgcattgcttaattggtttcctcaccagagagtaagtcacaagagagtaagaatgaagcccaatgcgatcacagaatctaactcagtgccttgtacatagtagatactgtgtgacttttaccattatgtaaaaaaacagcatgctggggcacatttgtactctactgagaaatacacctgtgatgtaactttcctattggtaactatgactttagtgtctgccatggtgcaagtagtattcttggaaaaacaataataaattagtccacctctactcaatgactcggttccaagtgagaaacacaatcattgtaatagctataatacaaagggaatcatgtaggtgtcatggacaaagtgccaactcttgctgaatgagctttaaaaggtttatattaaatattattgttatcctatggaaaggaaggtagattttaagtggaatggagagggtggttggagatttggcaatcctgagaaaaagaaaaaataaagtgggtagacagaaagaagaaaaaaagccagactccagaagaacatgataattaaggaaggttttaggaaaagttgtttccacacaactttggttttgtagggccttcagtcatctaagctagaccttaagaaggatgagacatgggattagttaagagagaactatgttcttcacacagcagccttcaaacttggttatactgacttgagtcttatttccttcagttggatccttcagcaacagcaatatttaatagaatcagatacctccattcttagtgctctgcccattttatttctgttgtggcatctatgctggtgccttctgggaactgtgaaacagttagttgtgtatgttttattatgtttgggattttgaagttttattccattgttttgttttgttttgatttgatttgttttctgagacagaatctcactgcatagccccagctggccccaagcttgagccatcctcctggattttgagggctagaattacaggtatgtgacattatgcctggattgattctatttttatttttctgtgccagctttgtctttgaaaatatgaacagttttgctatggatattcaactgcatttatctcacttgaaaagcaacgcatcaaacagtcactaccattgctcccattttagagactagaaaagcaaaaccatgccttaaaagatcagtgaggcacttagatccaaatgtatctcagtccaaagctggagctttagctatgaacccatgctgatgcccttgaggagttcatcccttaacctttcaaatggtagttttgctcttggctcccagcatccttaaaattacctccacacatgactgagatttatttgactacataaaaagagaaaaatttaactgcaaacaaactggtttattcttcctatacacatatgctgtcacactggccttgctcttcacactgtcaaatattatttttttagtctgggacattttccaaatttgaaatgttgcctttatttttcccaagtcaaataataactgccttgcctctaacagaagtagaatggcagaactgtgtttgtttctccttttcatttttccagattgtaccagaaaacactgagggaaacaatagtcttggagtacattagacaatggtgctagataatacatgtctgaacaatggggaaaatataaccctggtaaataaatagaaaatttgtttatgtattcattccttgtgtactagagcagctgtctataaagtgctacaacagagttgaacataatatctgactcaatgcattcccttggtcactgaaattagagtgaaatccagtcctgaagtgaagatttgcttttggaaacaaaactctctttattaagtgatgctctcagctgagaaaaaaaagtgctacttaatttaatttagaatataaaactggaatatgtactgtataaaaaaacagagaatttggatctgaaatgccaaggataatttcaaactcagataataaaacacagaagggcaataactcaaccttatagcttgagttcatattagcgctgatcatggaagtatgggtaatcatttaggggaaaaaaaagatattaattatctgaaaaaaatgaagataaggaattgtcattatactgtggtccagagtcaaaacacatgtgaaaaaatgttaccaatgatcaataaaattatgctagcaaaagcatgctaacagagagtaagaagtgaatttttggaaacctctgatctagatgtggcacccaaattcaaaattcagtctaaagataccttgaggaacaagctgtaacatccttgtcataaagtcagtatctagtccagaacatagaagcatttattgttgaaaagaactcatatttgttggaacacatattctcacccatcagtgaagctaaagatggatgagacccattttcaccactaaagttggccttaatcctcctcacaattttatgttttgtctaatgcttttctgtttctgttgctttctgagggcattttattattttcagtcttcctgagttgtatcttatttcattaagtttcagtatttcttgttttgaaaaaaaatatttcaaatctatagttttccaccagattccttgttaggtgtatttctatttgagatctgtttttatttctcgtcaatgttaaatatttcataaatttcatcaagctattctttagcgcattaagtatttagaattgtatttagaattgcattggagggagaaggaagctatttttttaaaaaaatgtatctctgacttactatattatagattttaatatgtggttgttgaaatagtctttggaatttttaatgcttttttgatgtctggaatgttatccattttttaaagtgggtttcatcattgctaaaagcaatgtgaattttctgtatgttgggtgctgggttctcaattctgtacctgttaaataaagcatgctgattatattatcccaaacatgtattataagtctgcttggagtctcaatttgtcaaattttctgcttcttagctgtggtaattctttgtgataataataatattacacttccccttccctttccttctaaactaacctcttacattatattgtcttacttatatttatgataaaattaccaatgaatgcaaaatcattgatgttatgaaaaccacacaatattttctaatactgtataatcttaccatgtttctcttcaaaatgattactttgttttcaatgccatttagggtgatcaataggcatctttactgaccactgagtctttctgctttggtcttcactttgaaatatcctacatacaaaggaggtgcagataaaacagagaccttctgtatgcattttgtgtaagccctctccccctcattattaaccagcaaccctttctgctttgtatgtattattcatacacattactttcttgaacatttaagggcaagatgctgactgatacacatattctattgcaaagccaaggttcaatcaacaaatttagttgcaatattatatctaacctataatttgtattccaatttcattagtttccccaattatacagaagggaagaaaaagaaccactgcccttttaagtggtcttgagttttgctcagaatcatttactagtgttttaaccccaaggatttctcatctcttttatattcttttttatcttttttgtcttttagaattatgatagtaccagtattatagggtgtgcttttagcaacttatggttgcatcatgattgtatgcagttattccggttatgaactttggggaaagaatcctgcagaagtgatgtgtcgggatataccctgttgatgccttgctgttaaaactgactttgattgcacggtcaagcccttatgtgccagtatcctctttggtaaagttatggtagagagatggttaggggataagaactcaggccttgacaagttttcatctgctaattttaactatatttccatgattccaaattaacttctgaaaatgcctatgtccagggaggcatccatagagcaatgaatccaagcaaaccaaccagatctgtgtgtctctttgtgatccagcctgcatggtcatgaggcatcatttctactgcagtatggttacaagagaaccatgtttcaactcagaatcaaaatgaagggaattaaactgagccatccaatttaaatgaatttttgtcaattttaaaaatagctgcattcccagtaatttatttgtatctatacatatgtgtagttgtttatttgtgtgtatatgtgtatatatttatgtatatataaaggatgaggtaaaacctttgaatatataagggaaatagatcaagatgcatagcatatacatgaatcaattagcataagagaacatgcctatattgagaaaagatggcaaaagctggttggtagatggaaagtaaataaaaggatctgtgggtgaatgatagcattttatagagtcaaaattacaagtgactcaatgtttgctgctgaagcttgatttaaaaaaaaactgcaaccactaaaaggatatgaatatgggatcatttgctgagaatttgctggtgccagtctccatggcaacaggaattgccacagatgacccaaaaaggtgaccagtatttcccttcccctgtcccccatgctggtgcaactcctcatttatactccctgagagaaagctgttctggagttttgcaccacactctgaaaggtgatctggcaaaggctgtggtagaaacagcatagccaaccatgacaccaaataagctaatataatctcagtgctatagacattgctaattttaagaaaatatttaatataccagccctatatcactaatacaagtatttaattttctaccaagaatttgaagagttctaagtagtacatgggattccagcccatttgtgattataatggataaaatttgggcaaatcacatgtctgcttttctccagtgggaaggcttactccgtttgactctgagtgcatcattcattacctatgaaaatgtgtgtgcccccacgggacatgtataaaccaatcaggggcaggaaatctcaactctgtggttctattcctttgttctgtcttgtgtctttattcatcttcattaattccaaggaaacattcctaacctcctccttcccaacatcaaatttctggctattcttttcttttggcttaatcaaaatctatttataacctattaagttatgtggttacatcaaaaactaaggctcagtaattggactatacttcccaatgtctgtaaagttcatggttctatttaggatcatcttgcaaaagctactgggtatcagccactctcaactcctaagcctggctttactataacaggataaacatcattatttgtgtgtgtgtgtgtgtgcgtatgcaatatatatatatatatatatatatatatatatatatgaatgacggtaaatttttaaatatataatagatatgcatatgtatctgaattacatttttaccaaactgaggagttaggagttgagattgtgtgtgcaaacttttctgttcgaatgagatgagtgagaaagaaaagaaagaaatccagggcagacacactttgattcacaatttaaatggcggtgtatttttttaatgcacatcatacatgaaaataataagacaatctctttgtctgggcttaagatgaaataatcctaaataaataacaagcaaacatgtatgcatacacacatgcacatacactcctatgcatctctttctgagtggcagcctccaagaagtaagacagggagaggctggagctccagtaggtgccgctgggaggagggctgaattccacattcacagttgcacaccctcccagggctatactcctacaacaatgcccctctcccaggatggaaaagatgagcatacactcttccagagggatcattggcatttctagtattataaactacaactttgtaagaggaagggtactcagaccataagagtccctatctttatggtagactgaaaatattgttaccatctgtatttttctttctttttcaatgtctcacacaaatgggattcttttgtgtcctgtaagtacagtgtgtcaaaggatgcttgggcaaattcaactttgcaggcaaactaaagagaaaggaaagaagctgctgacaattgaagtcaacccactcccttaactacttagcaggggcagactcagtctccattttccctttatactcccctccactcctaggagcctttctgccttcaactgcaaccagacgattgggctcactctggaaaacacacaatggtcttcatcccttaggaaaaactgcttaccatagacttgctttgatttggtaatataaaatcctacaacctaaaatctcaaggcattttttttctcttcttctttataatgaactctagttgaaatgtgtgtggggtgggtggtccatgtaaacttgttctattgagggagcaagccctagcaatagatccccacccctgatcctcctgtaagtctgagcaggaaagatttcatagctttcatttgtttgacaccatttagcaacctacttcatgcctggttctttgcctagctgccgggtatacatacagtgaggaaacaagacaagttaatgtagctctgcaattttctccctctacagtccatctcctgacaggagaaacagcaatttgtttctgattatctttaaaaccctgcctgatcacagtgctctatttgtaagcccaattcagacaactttgcatgagcaatgtttgtgaggaaatttgtgcataagttaagatggttgggatggcttgtggagagcaccagaagacaaaaagagaaaacaaatcctaaggcaatcttgatgaagctgaagtccctggaaaccatccagcctcctttgtttaggaaatccctctccagagctcagaggttgggggtcttcctgtaggaaggatgtgtacttattttcctgccacaggaatgaaaacaaatgttttatgttcagactgttgaatggcttcaaagcgattagggaagccaaggttagcagggtcagtttttaaattgcagtttagggataatattcaaaaggaactacacatgaatgcagaaacaaacttttggaaatgtttgaaaatatgaggtttttttggaggttgtgtttttagagggctttttgttgttgttgttgttgttttctacttttttccccatcgtgtattaattgtctcttactcacaggaaccctggactcctataaatgttaactgtggtggatgcaccctcattgcaggaaaccaatggtgcctaatccaagtggttcagattgctgaactagaaactgaaacacatttgttcaggagatgtttgagtttgtttctgatttttatgcaaaatctaatgaagcttaagctgtgggtatgtccacatactgaggctggcattcttcccttctaggagttaagtatacttgctatcttcactttaatccagctaatacattgttgcacacagtacccagtgttcccatgccagggagtaagctagagctgtgctgtccagtgcagcagccagcagccacatgtggacactgagcttttgagctgtgcccagtcctgatggagagatgctatatgtgaaaatacaaagctttggtccaaataaaatatttgtagaacataacttgtacagtgattaaatatttgaaaaacaaatagagttacataaaacagaggttttaactatatgcatctgcttccttttaatacgttttgatatggctattagaaaactaaaaataacacatggggctctaattcaagactggaatgcagaagcaacagcttgccttttaaatggcttcatgttttatccgcctgggaaccaagtcactaggagatgagcatagcacctacagactctcactagaaaacctaaccccactttgagttaggaaatggtcttcagataactctgaaaagttcatatgatggctggtgatgtcaatgttgtggaatcatcctgaatcatctaaaaaatctcaaatatgggactgtctagattaggttggcttgtgagcatgtctgtgcaggactttcttaattaggttaattgacatgggataacccatcctaaatgtgcttggcactattttgtggactaagagagagaaagctgagcacagcatccattgctctctgcttcttgacttttgacacaagaggaccagctccctcaaactctggctactgtgatgttcttactatactagactgtaacctagaacagtgaactaaaataaaccctggatttatgcttctagaaaacactatgctatccaataagggaaggaagcaattaaacagtcctacacaactgcaatacctatgagccatgacaactaccagcatggcaagacatacataaaagcacaataagtggcatccacatgtcagttgcaaccaacagctatctagtaggacttcaggcccatcaacagggggaaagcatgcctgggactggaaatgtagccagttcccttggctagcgaggtcatggatcttaaaaaagggatctacaacttccacttttctgtaccagcataattccttactatattctaaattttgcctcaatgccacaagtaagtatagctaccaccccttaccaaagaagcctgtcttcacagtaaacggaaactattacagaaagtaactggcgataatacacaggtcaccagatgcggggaggccagcccctgtgaacatatctatatcacagctcctgaatctacatctcagggaatatcatggaagagaggaaagaatgtaagaactggaatgcaaagaaatctgccatgaagaagtctctcctagaaatgactgcataaataagattggaataatggcaacatcaatggatatggtaacataggaaaggaaatttttgcagtgttacacctctaaataaagcactacaggcaactaatgacttctgggattaggagagttaactcctcccaaggatgagcctccttattgtttgttcaatgcagagtggtacacacaaacaatgaaaacagactcagcaagtggtatttatatacactggggaataagcacacacacacacacacacacacacacacgtgtgtgtgtgtgtgtgtgtgtgtgtgtgtgtgtgtgtgtgtcgcgcgcgcgcaatatatatgcaataataataaaagaaaaaagaggctggctatcaccttgagagtggtgagcctgggaggtgttctagaaagggtgactgggaggggctggagagaggaaaggaaaggagaatggtattctatttcaattaaaatattattttgaaaaatgaaagcattctgccagtttgttacatttgggatcatgagaaagttatcacagattgtccaagtgggaccaacataaacacagggagttcttaatgtccaggaagtagacagaggagggtatcagtgggagacgtggcagcagaagaggaagaaagaatgtggcgattatgtagtattaggaaaacagaagcccctgatgtggcttcggagaggaagaggaccctgaatggaggatgtgagaagcccccaacagttgaggaatgtgagggagtgaattcttcagaatctccaaaaaaagaatgcacccggtgaacatcttcaacctagagagaccgtggtggaacaaaccataaaatagtaactgtgtgttgtttccaaacaggcagtgtgagataatctattagggcaagagtataatggggaatgtccttctgtatgtttatcttattggttgttgaataaagtactgttggccaataggaatgcaagataggtgggagtaggagtcatggaggattctgggaaatgtagtaaaatgaagtcttgtgatacaggcaggaagtgacatagcaggcagactcatatataagcaagggcagaaggaagtcattcttttttctcttcctcctgctctctgctctggagctgccatgtgatccgggcaagagaagacaacaacagctggcatctgataagtctttatggctgatacttaagactgagctagcaagtaagaaagtaagaaatcctagtcagttggccaagcagcatttgtacctaatataaatctctgtgtattacttgggaccttaacgtggtggtgtgcagaactggggcagcttggggaaaagcgcccacatggaggcgaggctcagggggttttggagtaaagacttatcgtaacaaaagtagaaagcaatatagcaggagaaatgatagacaaacttaatgctaaacatcccatcttctacatctatctgctaccccactgggcaacactcctgggttcagcagctatttgcataccattcaggagtgtttggttgctgttatttctgttgctagtgatgaagcctggggtttgctgagcaaggtcagtgctctaccactgggttttacctctggcccctctgctgtgttttgtaatgggtacccctttgctttatagttgtcccgtttcaatgtccaccacacatctgggtgcttccttctacccccacagacactgatgccactgaggtggttggcattattcctccatttgtctttgggacttgggaaagcagcgtgtggctattttattgtagtttgtccttggattgcatgctttactcctgtttgccctttctgttcacaggtagaatgggtgatcggcagcttctgcaatcatttcagaatcagaatagaaaattgcagcttcgaggtgaagtgattttcttcacattgtgagtaaatagcccatgtgtgatagaattcaggtatttccaactccaaatccatatactttcttctatgatcatgcctaaaaccacgttttcatctgttgagacagtattgacagagcaaagaacaattacactaagctgttttgcaattcattggttttgtagatttattggtcactctctatggacctggctttctcccagggtctgggaattcatcaatgacaaggaaagcaggtccttccttcatgaagctcacattctgatgtgatataaggaagagtataacacatttagtgtgtctgaaaacccagcccatgctctacaagttgagaatgtctatcaaattatagctattattcctatgcattatttcacataacctagctaagcgccctactacatgcatttatctaggattccaacacatcttccctgtactttgctactggtccattaaggtcctttaagtccttatggaggactaagatggcttgttaaaaccgcaaagacataggggcttcaaaacatctcagcagttaaagcacttacaagatggagttcagatcctagaatacacagaaaagtcaggtgcggttcaacagctactatacctgtactcaaaggctgaggtagaaggattgctactactttgagaggctagcatatatgtgtgtgtgtgtgtgtgtgtgtgtgtgtgtgtgtgtgtgtgtgttcgtgcgtgtgcacgcgcacatgtatatgaattattatatcaatccaagttctagattttgatgatccctcacagacagcctcaccctccctggggagggaactagaagaggctagctttttaccatgagttcaggccagtctcacctccatggtgaaatattgcctcaaaagcaggagcaggaggagaggagatgttctaaatgcttcatcaacacaggatatggagtgcaatgtcacacatggaaatcccagtgcctaactgagaagactgccactatttttgagaagctatcttggactacacagtgaattcccagccaacttaagctacagtgtgagagtctatctcaaaaggcagtaaaggaagacgagaagagattttcttcctactcctcacacaaatagcacaggagaccaggatgtggtggcacacaatggaaatcccagcatttgaatgactgacacaggaggaatgtgggttctagaccagacttggtacaaagaaagaacctgcctcacacaaagcagcaagaagatgaaatgcactcaggacatgttcctgacacaagaaacatgcaataaatactattattgttgtcatcatattttactatattggctaaatgttatttaccagtaaaagttatattggtaaaattgttatgaaaattgcaataatttaaaaaatctgaatgtttacaatacttctttcaatgtattttcctgcaaatatctatgaaaagaggaacagaaattccctagatataatatgcagacaaaattttagacacttttaaagtggcattttcaattttatttttattattgcaaaagacaccctaaaggaattcttccaagcccttgagttgtgttttcaaagtaactcttggaggctgaatttttatagtagtattttttttgctgtagaccatggagtgtaggggaagctgtagacatgccttcttaggggctggctacaggtgtgcctgaccactcttgtaagggcgtggtcagactgacatagtgtgactgcgtttgctctttcagtttcactttggtacttgctgtacagactgctgccatgccggctggctaggtcactctgtaagtaaggcttttccctattaaatacccttatatttctacctgactccatactggcaatttctcactatatctggttgtcagaagcgggatataggaaacctgcaccccatttgggacaggctgtgggttccatcgggcccgcggcctaggcccggaaaacgccctctctccacaggtgctcccggctagcagccgacccgctgcagctgagctgctcagaaccatccacccagctcggagacagtttctagctgcctagagtcacataggccttggctttcagcagaggcttcccctggccgctgctgcgggaaagccgcatctgtttcagtggttgcagccgcaaggctgtatactctctaagataagtgcagctgcttttgtgacctctctccaccactgaccaactgctgccaaacaccgcggactaactgaaagcctgtgctacctgctggtcaaagatagttactgcatctggagtagaaatcaggtaaaattatggcggaatatttatcatttgctaaaattggtaatatttttgcttattatgtgaattcactgtttgaggaggatgctaatttgccaattactggcctatatgccgtaatggcagttagcttgctggtacaaatagtattactagccagaggactcaggaacagggacagagataacctcaccacctgcttgcaggaaataacagctttacgcaatgaggttttggagaacagattaggtcagaccacaattgtgcagcaagtggaacagaaattggatgataagcttggctctgtctccaatacgctaaagacagagctgtctgttacccaagatgagatgcagcgtattaatgccatgtctgagaccttagaggctaggctgtcagaagactgtgatgagctaaaaatatctgtagccagctagaaactcaaataggcaatgttacccagaaattagatgcaaaggtgcaagatacccaggattgggttgaagaattggacaatgccattcaatcaattattgaagcatccaaggtagcagatcacaaatttgagtctagatttgaatgtttggaagataatttacagtacagggctgattgctgaggactcaaaatcagcaaatcatgaccttgattctagactcatacaccattactgtacccagctaccatggtagaaaagccagcttctaagaaacacaatcatggactgatggcttatgaatggcaacctatacagctgaaggatcttaagaatattaaggaatcagttgtctcatatgatctccatagcccatacttaaaacagctattacattcatgggcaacctttaacagggtgacacccacagattgggaacgattggtagcagctgtacttgagaattcatgccaaatctagtggaaggatttgtaagggaagaggcaaagctccttgagtgtcagggcataaaggaaggttttgaagcccctctagataagcttcttggtcagggtatttatgctgacccacaggttcaggctgaatatgatgacgatatactgtctctatgcaggaaagcagcattaaatgcctgggatgagattcgtgagccaggagaatgcctagaagcttataccagaatagaacaggggcctacagaacagttccaggacttcttacaaaggttaactagggcagtagaattacaagtaacagatccagaaacaagacaatcaattatatatacaatagcttatgagaatgcaaacccaatatgcaaaagaatatttttgcctttaaagatcagatcagctccgctagaagaatggatttgtatgcagccaacattgactataatgtgcaagatactggagcttgggtaggagaagccatctccaaaggtttaaaacggcaacaggaaattaaaagttctagaggtgaggatgtaagggcttggcaaggagaagcaccttacagaggtcaacttaggtaccaagaggctagaggttactaatactatgaaccagaaccttgggtaggaagagccttcccctggagaccacgaaggctccaggaacctagatgtttcaactgtggtaaaatgggacatactaagagaaattgtagacaaatgaattctaacagtgcctcatacggaaggccactgccttctggattgtgtagaagatgtggtaagggcagacactggaccaatgaatgtaaatcgaccagggacatacaaggaaaccccttaaggtcgggaaacccctgggggggcctcaagaaggcccccacatggagaaaggtcaggtcattcccaatagcagtggaagacaatctctcacaggaacaatagatagttctttgcctattgtgaaaaatgatactgctctagatgatagtttgaatagtgctgaagaatcaagtgtgaatggacaaaatgagaaacgcatattttggcaagcttctattaatgataaaaggcctcagttgaaagtgaaaattaataataaagttatttctggcttagtggacactggggcggatgtaactattattactcaaaagtcttggcctcagaaatggcctcttagagaggcaaatgtacaatttttaggaattggaactctatctagagttcgacagagtgttaactcagtggtctgcattggaccggaaggacagaaagggatactgaaaccatacatggcagatatagctataaatctctggggtcgtgatctcttacagcaatggaatactcagattaatattcctccagtgtcagatacaaattatgtacaatctttagatagtagaaaagatctggtaagaagctatggaaaacggttaccaaccatccatgctgtacagaaattaggtacaaatgatggaccttcagaagagccaaaggccctgccattgaagtggcttacagatgaaccggtttgggtaggacaatggcctatgacctctgagaagctagaggctttagaaaagtacaggaacagctagatgctggacatatagaggaatctaccagtccttggaattttcctgtatttgttatcaaaaagaagtcaggtaagtggagaatgctgacagacctgagagccataaataaggtaattcaaccaatgggctctctgcaaccgggaatgccattaccttccttaatacctaaaggatggcctattatagtcattgatctaagagactgttttttcacaataccattacaggaaaatgatagagaaaaatttgcatttactgtacaaactcttaataattcacagccagttaggagatatcagtggagggttttgccacaaggaatgctaaatagtcctactttgtatcaacactttgtacagcaaactttggaaataattcgtaagaaattttcacaatctcttgtttatcattacatggatgacattcttttatcagattctaataaggaaactttggaacgtatgtttgaaatggtgaaggaagttctgcctcattggggattacagattgccccagaaaagatacaaagaggagattctaaactatttaggtgacaagatagacttacaaagaatcagacctcaaaaggtacaaattaggagagatcattatcaaactcttaattctcttcagaaattattaggtgaaatttctcaattgcagacgattattggtgtagaaggacatgacttaaagcatttaaaaatggcccttaaaggtgataaggacataaacagtccgagaatattatctgctgaggcagaaaaagagttacaattggtagaaaacagaatattggatgcacatgtagatcggataaaccttgatttagactgtattctggttatcttgccatccagagattacccttctagaattctgatgcaaagggaagacactatattggaatggatatttctgccacataaacagaataaaaaattaaagacatatatagaaaagatttctgatttgattttaaagggtaaattaagacttcatcagctgactggaaaagatccagcagaaattatagtacttttaactaatgaagaaatttcctccttgtggaaggataatgaatattggcaaataactcttactgactttttggggacaattagcaacaactatcccaaaactaacagaattaaattcataaaaaagacaatctggattcttccacgtattgtaaggcaaactaccatttctgaagttcttaccttctacactgatgccaacaaatcaggtaaggcaggttataaagcaggtgaggtaagcaaaatagttcaaagtccatatatatctgtacagaggcagaattatatgcaattctcatggtacttatggattttacagaacctcttaatatagttactgattcccaatatgcagagagagtcgtgttacacattgagactgcagaatttgttcctgataatacagaattaacttctctgtttttacaattacaggaaactatcagaaacagaagtaatcctatatatattacacatatcagatcccatatgggtctgccaggcccactagcacaaggcaatgatgagattgatcatttattaattggaagtgtgctagaagcctcagaatttcataagaaacatcatgtaaatagcaaaggtctgaaaaaggacttctccatcacttggcaacaagccaaggagatagtgagaaactgtcctacttattccttttataatcaaactccattgccagcaagttgtaatcctaagggcattcagagaaatgatgttcggcagattgatgtctttcactttgcagagtttggaaatttgaaatatgtgcatcatactatagacacattctcggggttccaatgggctactgctcttaactctgaaaaagctgattctgttattacacaccttctagagttatgggtatacctgcacaaataaaaactgacaatgctccagcatatgtctctacaaaattggaacaatttttcaaatattataacataaagcatgttactggtataccacaaaatcctacaggacaagcagtggttgagcgatctaatagaacacttaaggagatgctcaacaaacaagcttggaagactaaatcccccaaacataggttgcataatgctttactaacactaaactttcttaatgccaatgaaaaaggacaaacagctgcagaaagacactggactatggagaaaactgctgaactgaatcagccagtatacttcaaagatgtactgaatggaaaccaggacatgtgttatgttggggtcggggttttgcattggtttctacaggagaagaaaaactttggataccatcaaagttgatcaagattcgagttgaaaaggaaaaacatctcaatgatgacaaatgacaggtattctactaaggtatatctcataaactaaatagaaacctcctaaaggaaagggaagtgttttgcttttatcttcacagaaaaactcatcttcagaaggcaaaggacactgcatgggtagatacttaagaagaaaaggtagctataaccatcaaacaaaaggaaactgccatatggtaaactttacagctgtctctcaaaaacctctatttctctttatttcctagtccctattcaattaaaccaatgctggatttagaggtggatttggctttcctcctctaaaatccaagcacgttatttaactaaattttagtgtttctgtgttgtatcaagaagccaattgatgtaatacagaataaaagaagaatttagggactgtctttgtcttttcttggattgttctctcaaggtgtacaccctctcataattgttatgctctcgtggttgcattccccagcatgtgtacatatacaagcaaatatttctctgctagctgtttatgtttgagtcccacacagccaatgaagacctgcctgacaccaatccctggacaccctggaaagaaaatgggccacacctcctcgactgcactggatccaactttctccatttcaactgacactccggccaaatcttcggatactgacttcaatcaagttgaggatttcaagcgagatcttctatcaagagaatcccatctaacatggactggatacaatccattcaagactttttactacactaatatattcttcctacaggaccccacatgactatcatcgtcccatttcagcagaagtaactcggaggatgctatgcccctttccccattgttgtcacttaggatagtgtatatacctagttagggatagcttcctattgtttatggttgggattggaaggaggtgttcaggcttggccacctctttcagatgactttagggtttagttaaaatagatagttaggatttaacctaagcagattgttgtatcttcttatattttacctttatgattgttaattttggatactttaaactgttaagttttaatcctcttttagactaaaaggggaattgtaggggaagctgtagccacgccttcttaggggctggctataggtgtgcctgaccacgcttgtgagggcatggtcagagtgacgtagtgtgactgtgtttgctctttcgggttcactttggtacttgctgtacagactgctgccacgccagctggctaggtggctctgtaagtaaggcttttccctattaaatacccttatatttctacctgactccatattggtaatttcccactataatggagtatcatttactcttgaaaagttgtagcaccatctaccctatgtaactttccatcagccattgagagggctctgctacctgctattataggaaattacattagtgcctgttcaactctttttccttaaaagcaggtttgctgtgtctctcttactattaattctatgtgtctacttaaagaagcagtccatgtaatttcatcccttccagcctcattttccctttatggagattcagcatcagaatgagtgcaaggcttaaccattccttggaaagatcttgggcacagagtaaatattcaataatacatattcaacatcattactaatgtcaatatttttaggatgagatcaacttacattgataaactttaaataagaaggttgtcttctatgttctagccaatcagttgactagaacaacaaaatgattggcaaccccaaaatgattgtcttcgggcttcatttgcaccaacaatgatcctggatcttggaccttctctgcagccttcactggaatttgctagtctctataattgcaaagataataccttagcataaatctctttcataaaatcttatgggctgtttccctgtagattctgaaccaatgcagtcttccaaggagttttattcctcatgttcctattagaaagcttgagaacttatggtttcaggagggcttcctggagacaggatgatacagcacacagacacaggatttaaagacactctgcctcctaccattagttctagtcacataacatcatcccacctagccttcacttcctttaaagtggcttgaacatcagaatcatttttaaggctcaaacattgcttggaaagctcttggctacagaatcaatgttcaatattgtgtataagcagtgctaattactgaagccaatgttttttagttaattgttggagaattccataatgcatataatatgtttttgatcaaagccaccttctccctcatctctaactcctccccatcccatcattgtgtttccctccctactccagacactctttttaaagcccagtgagtccaattagtgctgatcttatgcacacgagagtggaaccatctttggaacatgggcaatctatcaggggcctcaacactgatggaaacagacacacgcatccttcctataaagacatcagttgccaatagctcctcagctaggggtttgacttcattagactctcccccattcatagagaaatctgagctagtaaagtcaatatactgtaccttttaatacattaggatggatggtcattaatttgtcaatttctccacagccccatttgaactagaagaaatatataccttttgaatcacagtgacaatcctggctttcattcactaattcatattcaacaaagaactctggcttatttttgtcatttttcagtgagctgtgatcctcaggtgatcaacaacgttgtttagctgcatttatctctataaagttattcataacaagatcacaattggctataattacctccagaactgaattgtaatcagataatggaattatatttctatattgtaaaggaatttcaggggtaaagcatcatgcctttttagtaaaatattcatttgcttgtctttttgcagaaaattataatttagaaaactatttttctacctaaactcagtagggcagcccacaagccctctaatcccaacctggtattttcctgggtaatgctccttatagggtaaaaaaaatgtcttttccttcagacagagtgacaggctctctaccaggcgtggtcctttttctggtttcttcctgacagctcctccataaagtgggcattagaaatcacattttagtcaattgaaaacccaggcttaaaagggtaagctaaattaccgcatgttattcaaatgcagtcccaactcccttcaaagtctactatttccaacaccacatcacctccttcagatcagcaacaatgtattttttctttcacgtcagagatccacgacaaggggaaagtttactaagtatagcacttgtctgtttcccttataaaaactgaatccatgtaaggtagcgtgatgtataataacatgaaactgagtcaggcccatcctccccaaaccaagaccttcaaagtattgatcagctgtaatactgagccctaatgctcactcatgcaaggctctgactctatctcattttggatgacttttctcaaacctcagctgttcaatcttgtgactctgtcattgttaccatgaaagttattttatattcaatcattaatcatttgtacacttttactttattgactacccccagtttaatcgttctttgaactctgtaactttcagcctatgggtccttctaatttcccccatttgtcactgtaatttttttattttcattcaactttccaccaattatctaccctttattgttttttaaacaagttttcatgtatcctagactggcctcaaacttgctctgcagccaacaatggacagtagccttggactcctggttctcttaatgtcacctcccaagtgctagaaaacagttgtgtacctcttcgccagtcatgcatggtaaatgagcattgtacccactgagttggttgcccattcctcagccatctatataccattttaatagaactcttaccaataccctaaattcttttcttcattttgttactcctttctgacaaaatatctagccctcaacaagttgaactattttcttcaaagccatacccaaaatctaaaccatactagaaaaataccacacatttgataagtgctatagttttcactaataagtgtgtgatggccatcttcaaaatgacaggcaatactttcctgtgaccctggagtgttcctctttattactctgccatctccccttactttctcttatttcacatagaaagcaaaatagcaaacccatgcaataaattcgggcatgtcaaaactatcctgcctaccttgtagttaggagcttaccaaaagtggcccaccttgcacatggccggcttcatacacatatgactttgatccttccaacctattatgattgggatttttaaagtgttcctaaaatatatgtgtttaatgcttagtccccagcacaactttggtcagagttggagcctttaggaagttacgggatcataatggctctgacatcactgactgagtaatccattcaatgattcatcgcttaatgagtttggaatgagactttgctatgaaaatgaactctctgcagttttcttgaggttagcagcttcattctggcaggtgttctcatctataacgttcagcctcatgaaaggcccaaagcaagaggatcaagagactgtgtgtcgaaagctctaaagttgcagaccaaaataataatttttgtccttttgagttgattgtccaaggtattttgtcacatcaatagaaagtgaattacctcagagccggtctaaagaaccccttataagtgactgacatctttctcagacaggcaaattctttcctcttcaagtgcatccctcccttcaatgtctaagcatgtttaagtcccctctcttaaaaacaattgaacaatatgagaaaatataactctctccagtgagagagttgagctcaactcctgcagccagagttgagcttccctcctcttcatcatcattcaacatctcaaaagagcctcttctccccttcctttccttttctccggactccatgggagtcctgtcttcattggatagaatgaactctgaagccaaagccagattatttctcttatcttctatgattccatgttgattttctcctatgtcactgggcatgctttgacaatactaactgatcccatcttaccccacacccctgcccattacaggaatatctcacttctctgtcctatcccctcagacaactgcctttatatgattttgtcttatctcatggttttaatttatatttattagtggcttctagccttcctaatactgtgatcctttactacagttctgtatgttatggtgacccatacataaaattgttcattgcttctatatatgtgtaattttgccacagttgagaattgtaatgtaaatatatgatatctgggatatctgatattaccccccaggttggaaccactgagatatatggtgatgactcaagaagttcgctctctactccagtattttcagggttatatggggctatgtgtaaagctacaaaaattatgttttgtgatgaagaaatagataaaattcaaaatgccttaactggaccacactggcttcctttctgaaagtcactgatcttcaagaaagagactaaatgatatgtgtttgtttgtgattctcactcaactcctcttttgtgtttaacacccaaatattaagagaatgctattaattttactagtaatctgttaacttcagaatgaacatactgctgaagatcctcctacaccatcttaatattctcttcacaaactcctgaccctactgaactctccagtatcttttcatatctctctcttactcactacttgctatcatcctcctttgcagtagtagagataccacgttctctctgaattttggcctttaacattctggtcattctaccagaatcactcagttacactggacacaatttattggtaaacctttcttcacgatgcttgtttgaactatttttcctatgacaagtatatctgaacccccaacaccaagggggaaaagttatttactgtacatcaccataaccatttgattttagtaaacttccccattatttcaatggcttatctaatgtccaattataaccatctattctaattctgttggttcaggggcaatgccaatcttaattaaacatgcctccattatctggaaaaaatattttctgtcttgatttttgtagacaaatacatgcaaagagagataaattctgttgtttattaaataaaatagtaggaaagactaaagtgtcctcaaaaatgaaaaccaggcatatactcagtggccaaacatccatacataaaaaagaaaataattaaatctttaaaaaatttaatgaaagcctaaaggaatcatagcattctcattcaaaataaacctacataaaataacttgggaaaacaataccaagacatcagatggaaaattaggtttcaaactcactatgaagaataatatcacatttttatataactcatatctggtttgcttctatcaataaacaggaacattcagaaatattttcaccagaatatcatcaaccagcattatttctgggatttgcagttgatctattcatattctacatcatgagtatgtgtggatcgattaacatgagttacttttcttgctgctgcgacaaaattcccaatgaaaacctcttaagcaatagttctcaacctgtgggttgtgacccccttggcaaacctttatctctaaaaatatctacattacacaattcataacagcagcaaaattacagttatgaagtagcaacaaaataattttatggttgggtcaccacaacatgaggaactgtattaaagggtctcagaattaggaaagttgagaaccactgctcttaaggaaggaaagattaatgattcaaagggatacagtccaccatggaaagacaggaatggcagcaagaatatgaagcaactggtgacattgtgttcatagttaggaaggaaacagatgaatgcggtgcacaggggcttcctcatctttagaatactgcaactaacattcaagataagtcttccctctgtgtttaaatctttctggaaatgtcctcacagctgtgcagaaaggtatgactcctaggtgactcccaattgagtcaagttgaaaatgaagactcaccatcagagtcagcttcctatttctaaagcattactttagaaaacactgttgtttgaagatttaagtacataatcagttggcttcacgcattgtggtacattgtggtaaaagctcatgacagatcaaaattaccacaaaggtaagaagtgacaaaggagaagagtaaaatgccagggtcctactattccctgtaagagcacatctaattatttaaaggccaccaccatgtcccactttttaaagaatcctccccctcccaatagcacaacaggatgggaccaaaacttgaattattgcatggatctttaggggatattctgaatctaagctatagaaatgtgaggctcttatagtcggggaaacattctctttaattgaaacttttaaaataaagttgtggagggatattttggctcatctctttcccctgtcaggaaggctgggaacagggaggaattttatttgttcttgaccaaataaatagaattgcaaaagacaactcacactgagttgtggctgtcaggcaggcagatggtatgttgtcactgttcctacaagacaagggtaatggctgagtatcctaccatctgttgctcagggatattttgcaggtctttgtgaagaaagtttttagttttatgaattcaccaggaacacttctgcttaaataacacatttgacaggaaagattagctacttctagttattttcgtaaaaatctttctcaaatcagggctatactcatacatacttaaaaacttgcaaagagaaagggccagaagtaaagtctatcctttgaaaaaaatatatggatatacatatatacaattttcatttgcaaataccatggatgaactctagattcaaataatgatccattccatagactatatgggaagaacacccatgatggaagctctgccacatcagccatttgatttgttggcatggaacaatgaaaaagcaaaaggcttggggcttaaatattcctgtgcctaaattctaaccactcattggaatggttattgaattatgaaagtgtcctgtattttctctgggcctcagtttcttatatttttggttgtgagcctagcctttaacagctgagcatccctccagccttcggcctcagttccttaacttacacaatgctgttgagaggtaaaaggaaacctaactttgaattcctgactcactgccctgtacattcaagtgcttggtttgtggcaatgtgaagggagtgtctccttgactagcatttagagctcattatgcaaccagtcaagtatctactacagagtgtacactggagagacaatataaagacatcctagccctctggagtttacatatccatgataggctgaataatgtctcccagaagattctcacatctatgttccatgaattaatgaaaattactttaagtgggaaaaaggttcttttcagatggggctaaatcatggatactcagatcaggggagtgtcttggattatctgagtgagcccatgcaatgatgattcttagaagaaaagacatgaaaataaaatgaaaagcttggagtgatagaaggaaagcaaaggcagggagtagatgtctcctttgctcagaaggagacagctctgccaataacttggctttagtcagtaaaatggatttccaacgtcagaaccataaaactgttatcttcagccactaagcttataatcatttgttacagcagccataggaaaccaataaactgggaagaattaaactattaattacataatactttaatacaattgtgataagtacttaggtgattaagtaaataaaatgaactagtgaaagcaagtctgggaagcagggcacctcttctgaggggcagatttttcattttagatttccaaaaaaaaatacatatatgttcatggagtgaagggagaaaaaaatattctaggtacagaaaaatccttgtcaagaaagagctagcacagagtagctggaatccagcccaagaggtgtgggaggggcacaaaagaaaagaaggcaaagtcagcaagagaggacaaggtaagaagggtggggcaaacactacagaaaggtttttaccttgcagtgctttgctagcctctttcagatcaagccactcactgaggacttttagaagaagtgaacaaaactggattgggttttttttttttcttaacctactaaaagcagttctgaactaccaaaccaatgagtgtttgaagaattttctagacagaaggaagttcagagatcaactagagacatttttctaccaaaaacacttcctaattcaaaaggagcagcaaaacacgtataaaactgagcagaaagttgtggtggcccagtcacagtaatagcagttacagagcaaaagcatttactttgaaaatcccaataaacttggctctgccaatccccatgggtcaattagaaaagagtaatagtaaaaagctagaaaaaaagagatttcataaatgtaattgcattgagaagtgctgataaggggtatagtgaccccaaatcatcatcaggatacaaaaaaaaaaaaaaatccttaagtttaaacagagcagggaaaagaggcatgcataatttagcagccttagtcaaagtgttatgtgcttgattattgtcctagtctgggtcctgccaggtggttagttgttgttactatcattgttggggtgggaggtgggcatctggttcttataagatgaatatactgtctcaaaggtaccatcctatctttgtagttaattgcccttatttgagaatgaagcagtgatatgtctgtcctttggctttccattccttggagatagttttgatcccatatcataaaaatgtttgtcaatcagtcctttttttttaacttactttcaccttttccccatggaactgaggaacaaatctagggtttgtacatggaaatatgtatgaggaaaaaaagataaaagaagcaaatcattttttaaaaaaactaagcaaaaaatgacaagttaaatgatttgaaagctgagtagacttttgtaaaatctcacagactggagttggagctgagtgtccatgaagaagctgagaccccattaagcattccacatttttatttaaccccaaaggctatccatggagttaaggaaaggcaaaaaataaatcacttctcaaaatatccaaaacccaactctggactgtttgatcattccttaatgaatgtctcgatatccacaactacctaccatgcagaacctaatgaaggtcgccatatccaccaccaatactctgttaagtgggcataactttaaaccaactcctgatgacttatttttatacccatataaatatctcttgggactaaagagatggcccccatagttaaggacactagctgctcttctagaggatctgagttcaattcccagaactcacgtggcagctcacacttgtggtgatcactttcaattcttataaaatgcataacgtcatagattcagaaaccatgaggaaccaagcaaaacaataacgaagaaaattaaattttcacacatcatcaaaatagaacagagagaagaaaatatattagaaccttgaaatctaaaggagaaaacagatacagaatttcatttaaaatcctatttgaaaaagtagaagacacaagacaagattacaccttttgctctcaacattatgaaagacagtaattttcaacctgaactccatgggggcgaaattgagaaaacataaattgctgctatttaaatcgggacacaagtggagacagagagatgttaataactggtaatttattaggggaaaatactcacacaagggaaccagtgaccaggtttgcactcagaaatggactcagaaatgcttcccagttggctcagcctaatgaaaaggctttgtgctggcctccctggatcttaaatcccttctatgtacctgtgaccatgcccaagcaggcgtggtcagcggtacctgtaatcaggttttcttcctacagttagttattggactcatatgaaataataaaaagagttcttacgttaaaacaaaaacgtgtggttgaaaaacagcaagaggagaatttaaaaccaagcaaacatgaaaatatgtgagaaatagttctccgtattatctgaaaatgacttaaatttgtattatgctatattatgacaaaatacacatgtgatccctggtgtgattgtggaaaagtagtaagataattcattttaaacttggttatgggagacagaaaatattttaagttaatgcaaaagaaaccaaaatgtttaagataataaaaagaaaaaccagaaaataaatgcaaaacaggtaaaagaaactcaaagcaaataagatacatacaaatccaaatgctcaatgcttacaattaatccaaatggattaaacaaatcaaaatatattgtgcttgcaggaaaacacaaaaggaatgacttaaaatgttttcctttttaaataaatacaagaaacattttacgtttccctgtgggactgtttttcagaactcagttcaggttttcctttttttatcactttatttcatgactttagttgaaaacctcgtaattccctttaagctccatttgattgtcaagtgcacaactctctctaaatcttagagcttatgattttcatacacacaggatgagtgctttgtatgctacactgtaatgtgcttggctacggcagccacttatttctaccgaatcctgcaagaattttctctgaggggacgggcacatgataaagcaaggaaaaagatgtgacctgagcataaccttgaattgtccaaaatcccctcccagtcaccttctgccatatttaggcttctgtgccacactccatttaatgcattttcagagtatggtattcttttttttttttgaggaaactttttatttaaattctttaattactactcatatttacatatccatcgcaccattcactctcccttccatcctcccatgttccccaccaatccccaacccatcccccaactcctccccagggatagtgaggccctccaccagggaccttcaaagtcagtcgtgccgggcggtggtggcgcacgcctttaatcccagcactcgggaggcagaggcaggtggatctctgtgagtttgagaccagcctggtctacaagagctagttccaggacagcctccaaagccacagagaaaccctgtctcgaaaaaccaaaaaaaaaaaaaaaaaaaaaaaaaaaaaaaaagtcagtcgtatgtatcgtttgggggagggcctaggccctccttgctgtatctggtctgcaatagtatccctccatagggaatgggctcccaaagtccatttgtgctctagggttaaagactggctccactgttagaggtcccatagactgtcttggcctcctagctggcacccacattcagagggcttggtttggtccaatgccgtttccccagctttatgactagggtctccatgctctcactagggcaggtcaactgtttctgtgggtttctgcagcactgtcttggctcctttaatcatccctcctccctctccacaactgaattccaggagtatggttcagtgcttagctgtgggtacctgtttcttcttcgaacagctactggataaaggctctaggaatggtaaccaatgtagataccaatctcattataggagaatgccatcaatggcattttctccaccagtccttggattcttagttggtgtcatccctgtggatcccctaacatttcccctgtgccagacctctctccaaacctgtactgtctccctctatcaaggcatctcctttcttgccctcctctattcctcccctatctcagtcctcttgttctcctcccccctccccttcttcccttcccacctccttcctctccaccctgccccatgctcccactttgttcaggggttatccccctccccttctttgagggactatgcaatgttctcatggggtcctccttgtttcctagctcctctgggagtggattatagactggtaatcctttgctctacatctaaaaatcatatatgagtgagtacataccatgtttgtcttttttgtgactgggttacctcactcaagatggtttcttctagttccatctatttgcctgcgaatttcaagattccatcgtggttttttttttttttttttttttttctgcttagtagtactccattttgtaaatgtaccacattttctctatccattcttcagttgagaggcatcttggttgcgtccaggttttaactattacaaataatgctcctatgaacatagttgaacatatgtccttattgcatggatgtgtattcttggggtatatgcccaagagaggaattgctggatcttgaggtatgtcttttaattagattaagttattgcactgtgcaaggctctgttacacctttttcctcctcctcatccccttaatttttagtcttggtttattttagttactaagacaggcatgttaaatgcactatatagaaatttcttatatgttcttagtttttattcagcacattttgaaattctattattaaatgcatgtatatttccactgttgttattttccacttttgtatgtcattttatttaattttttttcctgtaagtagaacctgtctctgctccttaatgatggtatcaaaggcatgtgggccaccatgatcagataattatctttctttaattccatattttaataatatctaatgccaatgccccaagcatgataatactaaagaattacatcttttaatctgattgtgatcctgggaagaggatgccagctgaaggtgtcctcgataagtcttataaaatatatagatttatgataattaagactgagctagcatataagaaatcctagtcaattggcgagcagcattgtaaactaatataagactctgtatgttattctgagtgaccacatggcagtgggcctcagacgaatggagtaaagacttatcgttacatctgatagccactgtgattgtggttaggcaatgaagaactgtgatttaaattatatttaatgttgattttaaaaaataatatatgctccaaaaagataaaagttgtcaatattagagctgaaacttctagaggaaggagtaggtgtacacttgaggacatgggttcaggtaagaactttctgaataggaccctggtcaccaagtaattagaacaaataagtaagaaagagttatatggaatttaaaagcttctgtattaccaaggaaactgttgattggctgaccaagcagcctacaaaatgggaagaactctttgcctactatacagctgacagaggattactgtctagaatacatgaagaactcaagaaactagacaccaaatacacaactcaatttaaaagtgtgcttgaagctgagcagggaattcttagaagaagaaataaaatgcttaagaaatagcatttaagagtcagaaacacccccaagggatatattacctcctactgggttacctcatccaaccctaatcttgttgcatcttattatgacaaggtcagttgatatcattgggaggcctgctcttttctgaagtagatggaggaacagtgggtctggcagagaggggaggtgggggaggggttggcagtaggggagagaggagatgctgcagtttggatgcattgtatgagagaagaataaataaaatttaaaaactacacatactcaaagaaagaaaaaaatgacttttaaagtattcattcttacccatcaggaagatgcaaattgaaactactctgtcatttctccttactccagtaagattaagaaaacaaaagacaataaatgctactcagaatgtagggaactgggaactctcatacaccattggtgggaatgaaaattgattcagccaatagggaaatcggtgtgctaaataaaaaaacagatatagtttgtttcccagtcagggaagtaagataatctgccagacgttagtgactcacgcctttaatccctgcactcgggaggtagaggcaggcggatctctgtgagttcgaggccagcctggtctccagagcaagtgccaggataggctccaaagctgcacagagaaacgctgtctcgaaaaaccaaaaaaaaaaaaaaaaaaacagatatagatttataatatgatctaattatgccactcatccactcatggacatagactctgaggactctgtatcctacaattgagacatatgcccatccttgttcatcgaacttctagagaaatagcaaggaaagagcctagatgttcatcagctgatgaatagataatgaaatttttatatgcactggaattttattcatttataaagaaaaattaaattatgaaattttcaggtaaattgataaaactagaaaacatactgagtgaggtaacctggacccacaatatcaaatgccacgtaatctcactcatgtaaattctggtgctaatccttagactttcaaatttagtttggggtacctgtggaatccaggaaactaaaaaggggccattggtggggagggagaagagtaaccatgagagagggggaaagtggaacataggtgatatgagagagagagggagaatattgagaaggattgtttaaggagagagggtaggggtagtcagaggtggaggcacagagagggatagctgacattaaagatgtttgggaaagctgaatagaaacttattattttataagcttcatatatacatatgtgaagtatgtgtatgtgtaaatttttatagttggccaactatgataaagtggatgtccccatacctatgggaaacacagactagaattagtgggctataaaaaacaataagggcacaaaattgagtgggtttggggaacctgagaggagttatgaggaacaaatataatcaaaatatattatatacatatataaaattataaaaatagcaaaatataaataaaatttggcattattgttggaaaatgtgtttgcaacaacctgagcatataaatgtgttttcactttgtaaaatatattccttgtaaaatctaaatacaaagcaaatactcctggcagaaatagtgcagaagcttttcatctgcaatgaggatatactgctgtgtaagattttgaagctctagtatgcaaaagaattcaaatatctcaatattttttcatatgaacaaatactcaaatgacaatattttaaacataattgattaagttatacacaattaattgtgatcacttcctttttaatatggtcactagaatgctgaacactacacacacagtttctttttcctatctgtacgatagaattgacctagatgaaacaataggagtaggatctcttcttatattggcattggaatggagagatgactcagcagatgggagcacttattactcctgcagaggaccagaatttagttcccagcatccaagtcattaagtaacttacaacaacctgtaactccagctccagaatatcaacattttctggactccacaggcactggcactcatgtgtgcacatacccacacagacacgtacatgcatttataattaaaaacaaaataactattaaaaacacattgtcttaggccaggtgatggtggcgcacgcctttaatctcagcattcaggaggcagaggcaggcggctctctgtgagttcgaggtcagcctggtttacagagcgagttccaggacagcctccaaagcaatacagagaaaccttgtttcaaaacaaacaaacaaacaaaaacccacattggcttaatataaagaaaagtcagtaaatattcctttatttgaatctgatccataaggccaaattttcctcaatcagaaactgctaaaaacattgctttagtgtaaataaaatgaaaccgaaaacaagtcatcatatattattcaagctgcaatgcagtacttgttttgttccaagagcatccttcacttcctaggtgggcggcaaactccttgaggtgtgaggccacatctttcatctcctgaatcccaacactacttgtctaaacatgtattagtcatccagtaaatacttactggtaaattcccagaggccctccagtgtaaaaaattgaagagtactcactctgtgaaaagtttctcatttgaaagttgacttttttttttttcactgaaatggctaggttggttgctggtcaaaatatcaatattttttgttctcgtcaagaaatgaagctttgatgttctggaaattcatgactgaaaagctactagtgaaatgtatatgtatataataagcaaggaaggtttagaggggggatgggaaatgacataattatgttaaaatctcaaaatataaaagaaaaaatttactggatcttgaagtagactgattcccatttttctgggcaactgccatactggtttccaaagtggtcttacaagtttgcactcccaccagcaatggtggagtgttccattttctccacatctccagcatagattgtcattggcgtttttgattttagccattctggccggagtaagatggtatcttagagttgttttgagttgcatttctctgatggccaaggattttgagcactttcttaagtgtctttcagccatttcagattcctctgttgagaattctctatttagttctgcaccccactttttaatttcattgtttggtgttttggtggctagcttcttgagttccttgtatattttggaaatcatccccattctgtgggctgtcattttttcttactgactgtgtcctttgccttacacaagcttctcagtttcaggaggtcccatttattaattgcagatctcaatgtctgggctactggtgtaatgttcaggaagcggtctcctgtgccaattcattcaagggtatctcccactttctcttctagaagataaagtgtggctggatttatgttgagatctttgatccatttgcacttaaattttatgcatggtgacagatatggatctatctgcaatcttctgcatgtccgaatctagttgtgccagcaccatttgttgaagaagctatcttttttccattacatagatttagcatctttgtcaaaaataaggtgtttgtaggtgtgtgggttaatatcagggttttcgattcgattccattggtctatctttctatttttgtgccaataccaagctgttttcagaactatggctctataataaagcttgaagtcagggatggtgatgcctccagaagatcatttattgtatagagttgttttgcctatcctggtttttttttgtttttccatataaagttgagtattgttctttcaagtatgtggagaactgtgatgggattttgatgcaattcctcccttgggcatatacccaaataatgcacattcatacaataaggacatatgttcatccatgttcatagcagcgttgtttgtaatagacagaacttggaagcaacctagatgcccctcaactgaagaatggatagaaaaaatgtggtacatttatacaatggagtactactcagcagaaaaaggcaacagaatcttgaaattcgcaggcaaatggatggaactagaagaaaccatcctgagtgaggtaacccagtcacaaaaaggcaaatatggtatgtactcactcatatatgaattttaaacgtagagcaaaggattaccagcctcttcaccaaagaaacgaggaaacaagaaggactctaagagaaaaatgcatggacccctgagaatgggaaggggcagaatctcatgagctaactgggaacataggggtaggggacagggagatgacagaatgagagaaggaaaagaggaggggagaggaggaaatggaggaccagaaatgttgacttgggggaagaatagaggagagcaggatgagagataccatatcagaaggagccacataggtccaaggagagatctggcactagggagatttccagagacctacaaggatgacacgaactgacaatctaggcaatggtggagaggataacctaaattcccttcccctataatgagactgatgacttctttttatgccatcctagagccctcatccagtggctgatggaagcagaggcagacatccacagatatacactgaactgaactctggaacctagttgcagagagggaagaatgaagatcaaatatgtcagtaccaggctggtgaaacccacagaatcagctggcctgtacaagggggagcacatggactccagactgctgtctgggaggccagcacaggactgaatcagacccctgaacgtggatgtcaatgaggagacctccgaactctagggagcccctggtagtggattagtatttttccctgttgtaagaagggactttgagagcccatcctatgtaaagggatgcactcttgtcctggacacatggggagggcctctgcctgtcccaggatgatgtgatggactttggggagcccagtcgaggaccctactctgcctggggagtggagggtggatggggtgggggcagatggagggttgggaggagggctggggaagaggggagggagaagggattaacatgtgaagcacacttgttcctaatttgaactaattttttttaattaaaaaaagaaaaaattaaaaatcaaatcaaaaccaaagaaaatatttgtaaagcagggaaacagatacatgtttttctattggggattttttctttgatttgcatttttttcttgctttcattttttccttttttgtcagtttcatgtatcccaaactagttctctgcttcctatgcagtgaaggatggctttgagcttcggatgctcctgccttccatctcccaagtgttgggattgtggaattgttccatcatgctcaacttaataaacttgtatctgtcaaaacagaaacagaattctataacctgatgaaaacaatatatgtttccatttaaaatgaaacaaaagtgttttaacagtatgtgctgccctgcaatggcatgctttcttggaaaatacttgcttccatctgctgaaagtattcagacaatgagtaaatagcataataaaggaaatgatggataaatgtcatcataaataacaaaggaaagacagaaaaacagcaaaaaatgagctgagcccccaaccaaacggttggttttgataggcatcctgaacctaacttcccacagctttcttcacatgcaaatacttattgcaactagtcattggtctggttcaagatttctggtttctgaagcacaataaacactggactgttgctgagacttatcttagatatcctgttgttgcccagagttaggggcatcttgaggttgggcagcatgtccaggagtaggatccaagagagctccaggccactgcatacttccttgcccttaacaccagctggcaccaccagctcattgggcattcagtgtggtcccacactcctaattctttaatctaataatttaagatatctttaaagtccctgtaattaagtaacatttcacctttctagggtctttgatagtattaaagactagatgggtttcaattatagttttctttagttatgataaaagataaattaggtacaaaactttggtctcacagatatatcatagataatagagtattttctcttattttgccaaatacaagtagactggatatttaaccataatttttattttaacttgtttttattgcactatacattttccccactctccatcctccgctcttctcttctacattccccatatacccatgctcccaatttattcaggagatcttgtcttttttccccttcctaggtggatccatgaatgcctctcatagggtcctctttgttacctaggttctctggggttgtggactgtatactacttatcttttgctttatgtctaatgtccatttatgagtgagtatatactatacctgtctttctgggtctggattacctcactcaggatggttttttttctagttctgtccatttgcctgcaaatctcaagatgtcattgcttttttaccactgagtagtactctactgtgtaaatgtagcacattttctttatccattctttaattgaggggcatccagattgtttccagaattacacataattctgctatgaacataattgagcaaatgtccttgtggtgtgagtatgtatcctttagtatatgcctaagagtggtattgctgggtctcgtggtagattgattcccaatttactgagaaactactgatttccaaagtgcctgcttaagtgtgcactcccaccagcaatggggaagtattccccttactccacatcctctccagcataagctgtcatctgtgttttttatcttggccatctgacaggtgtaaaatagtatctctgcattggtttgcatttctctgatggctaaagatgctgggcgtttcctcgagtgtctttcatttgaaattcctctggtatcaaattcctctgtttagatctgtactccattttaaattggattatctggtctttcaatatttagtttcccgagttctttgtatattttgaagatcagccctctgtcagatgtccggttggtaaagatcttttcccattctgtaggctactgctttgtcttgttgactgtatcctttggtttacagaagcttctcagtttcaggagatcccatttattaattgttgttctcagtatctgttctattgaggtacctgtaactcttgcttgatagatgttttttgttgtatataatcttactatgttaaagatacaatctttctttttaattagataaaaaggggaaatgctgtgggataatcctcttgtacactgtaagtatttgtcagttgacttggtttaataaaatgctggttggctagtagccaggcaggaagtataggcagggagaccaaactaaggataatgggaagggaagggtgaagtctagagtcaccagctagatgcagaggaagcaggagatgaacatgccatagaaataaaggtaccaccacatagcagagtataaataaggaatatggattaacttaaaatgtaaaagctagtaagtaataagcctgagctattggtggagcatttataaataatattcagcttctgagttggttatttgggaccgagcggtcagaagagaaacatctgactacacaagtctgttggtgaaattatgtaaaatgacaggactccttgaagacaactgtaccaccagggcttgtagaacactggattaatctcattggttttggtatcttcttattttagtgtacataacaagaaggcaataacattttatagaataaacccttatgctcccacaaattacatgttaagaaataccatatttaatatgttgacccttagaggtaatccttcaacacatggttaggttgtgacagtagaactttttggtcacccttcagcctgcatcttaccaagtctccttactttattcatgtaattcctcatccttgagacctaagagttgcatttttatattatcctatactggttctccgttctttctttcttgttctgcatccctatccttccccctcatactcctttccctcatcctcatcctcatcctcatcctcttcttctcctccttcttatttgacaggttcccactgtggagctctggctggtttagagtaccttatgtagaccaggctggctgtgaactcacagagatcttcttgcctctgcctctcaagtgctgggattaaagtgtgtatcaccaccagcagctggtactttttctttatcaaagagctgttttgtcttctttctgctgccctgaaactgatctccaaatgtcaatattattttttaaaaaaatctatcagttttccttacagatttaactacaactgtgagtattctggtcttcgttagaaaaaaagaaactatttcactttccaaatataatggttttaaatagagagaacaagaagaatgggagggagagggtaagaaggtgaagaagccatccaggatgtgctcagtatacattttgactgttctgatctaaatggggcattctcaggagctcagtagaagctgctcagaacctcgcaggtgtccttatattggtctgcctgcagttgcctctgaaaataatggctttctctctctggcctacctagtctccaatgagtctcactacatatcccaacattaaacttcccagaacaagaggggtcatcttctggccacaaaaaaaaaacaaaaacaaacaaacaaacaaaaaaccttggtgtggtcattgggcagctttataaccttgttcctctctgaaccattctcaaacgttcattctagggactaagcacagagcttagtctttattaatttatagacgattctcttaaaccaaaccctaatacatgactctgctctggtgggactgtaagtgaaatcagttttcccagacctgtgcaaaggcacagataaccccattgaattctgtttacattgtttttctcccttttaaaatttcatttctattttttagaagctaccgaggacttctttttaagtttcacgtttggttttgtttttagagggaagtataaacctggattctttaggagacagacatccatctttgcttccactgccttcatttctgctgtaaaaccataatagttcaccatgaccggaaatctttcttctaatccagtgcttctcaaccttcctaatgctgtgtcttatattggggtggctcccaccataaaattattttgttgctacttcataattttgctatggtcatgaattttaatgccaaaagggtcacctaagaccatcagaaaacacagatttttacattaaaattcatgaccacaggttgagaacaactgctctaacccatttttctcaccatagctagccaaagtcatctatctaacatgattcttcccatatcactctgtttaaagctgacaatactatttctacataattgtgatgaggcctcaattacttcaagggaatctatttctaatccctactttgtattttatatccctgccacattcaattccaacatgtactgcacaacgtctggcatcagtggggctcagtcagtggaagaacatataagtggcttgtttcccttctggataaaactaaggtgagattctctttctttgtatcttgcgtcctcctcttcctgagcaggactcaggactcactgcacagtggatgttcaaagatgcttgttgactagtgaaattcgcacattcattttaccacccaagaaagagttccatggaatcctgattcctggcaatttaaaacattttctgggtgttataattattggcccattgtagaataagaagtgagtgggtgagagaattcattagctcattaaaacacagtaaaaggaacataattaaaacatttaggcaatttctggatcacagaaagtgaataatcatgggtgcaaaacaaaccctcaaccagttggttgtctgcagatgcggtaccatttcctgctttctcagaacactgtcaactgcagctccaaactctctccctgccccctcccctcaagaggagttgctttaataagctctattcttagcacagagccaggaagcaggggtaccacagatcaaggtagagacacctgctgagcacttccagcagcttattgttagcctcacaactgtaactgcccctgtgctcaaagcagtgcacacatcttctttctttcaaatgaggtgcatgtaattgccatcatttaatggatggaattaaagtgtagggtctctaagactacacagtcatttgacagagtcaggccgagaaataaatggttgaaatcagactcccccaaattcctcttttaatcagtatagaaccctgaatggtcaggagattccccctctgtggttctggaagcacttggtcctcatcgggctagaatgtgaagatgcagcctgcctaccgaaccctgtaccactgacacagtagcttcctagggatgctcggtgggtgacaagtgttcattcttgttctctcccatcccattctccttgtaatctttgcttttataactccagtgctcattaattctctctacaccatctcttctcctgcccaacagtcctcaaagatcactagatgcccttcagttcctcctactgatatatggagtccctggaacaatagcaactggtgatcactctgcaggttggagctcaacataatgaatttggaaaggacagggaacaattccattcacagtatatgtagacacatctttcactctctccccttgacaacaccctgaagccctcagtggatgtttgaagcaaagagaatggtgcaagccatggttagaatctgaagataagtcccatcaatcaaaagggccagagacagaattgcagttgcctgactttctgcctgaaggcttggaggaaatttgtgcctgaagaaataatagagataataccatagatgttcagtcagtgaagggagacatgcagaggcagcagaaagagaaattcagcaaggtgaaacgtgagcaaagctgtgttttgtcagcagtgctgaatagaagcagacttgcagagagagtgtgcctgcagtgccagagagcagctgccagctccctcagctcacaggactcctctgcctccttctactctattttgcgcctctcccttctatactaatctctgagtcaatctttaattcctgcacaaaaagagaaaggatgtcccttcctgcatcaagagcatgaacctgaatgtgtatttcactgtcttctgtttacaacataaataaagacaaaaggctgaagaagtgaggttccttcttggtaccctacctccagatcctctgcttggagggaactagaaatagactagtgctttttgagtctaaggcttcttgccatcacctgctactggcccatatgagtctctccatggttccttcagcattctagtatgtcagtttatctaaaaactgtttcattatttgttctcttgtcttctgggacttttctttttctgtctgatagtttagtgtcatggtactattgatctcaccccattgttgatctattttaaagttttaaaaaatttaaaggagatacatgcatctgataaaaaattcagacattccccaactatcccccaagattcagttctcagaaatagccattggggtgtgggtgtgtgtctgtgtgtctgtgtgtgtgagtgtgtgtgtgtgtgtgtgtgtgtgtgtgtgtgtgtgtgtgtgtgtgtaaaaagttttgtgcgtcaaaacacagaacaatcaaatgagtgcattttaatcatggtgatacagaaatccatgtctgtggccaatggttgcatgtagatacactcagtcctctgcttcagagttgctgtaatctcttttcctattctaagcagatgccaccaggatgggtagctctgaattaagaagttagcattgccaaagtgcaaacatgggtgctcctcaattcttgatggggttacattctgacaaagcaattgtgagctggatatactgtaagtcagaaatgtgctctatgcacctagacttctgaatatcagagcttaactagatgacacagagcattggttgttcacctgtatgatggtcaaatggaaaccaccacttgatgtgactgcccattaatatcagagtgtcacactacagataagcagaatagggggaaaatgaaaattccaaaatcagagtacaattcctacaaagttcacagtgtttttgtacaggtctgaagttgaaaaattgttatgtcaggatccatgcacatgtcatcattgtttgttttaataatgaagcttaaatttttatgtctgtttccattaagagtttcacacaaaaatgaatgaatgcacagtgtcagctcacttaagttaacttgaagaattatgacactgggaataatttcccacaagtcttcactgtctaaaccatacagttgagtcaggcaatttataaatgataataacattcttatttatttgtgtaatatacaaagaagaaagtcaccaagagtcacctgactccaccccatttccagagaattctcctctttagatccatatacttgctgctaataattgtgtctgtgtcactatgaaaatctattacttggtgcctaattttaaaagatatattatcaaaggggaatttaaacaggcatatcttgcatggatggataatgctactcaaaaaaacatggattattaagtaaaactctcagcacatggcatgagagatctccctatgagttattggtcaagaaggcctcaggtaagatggtaagacactattgctgaaaagaccacttactttggatgtagacatagataaatcaacttcaaactggccaactctttccttactggttggcttaatagagccagaagatgctatgtaggcaactaagggaaaaaagacacaatggccttacctagaactggaccctgaacactgcaacactgaaactttaacaagatgtgttcactggtacaatggtggcattgaggtgatggggtaaccaagtactctgtgattggatatagatctgcttcacaggggggtatttcgtgtctggtgtaaaccttgtcgaccagtactactggacctagagaagggaaacctactgttgttttgccaaatggtcatgctgtaaaactggattattaatatttacagtaatgcctgtagatttatgctgccctcaatttaggtcagagaaacttctttttgtggtaggtaatggtcaacacagagactcataagtggtccaagtggcaagaatgtgtaactctgagtgctggggatagtgatctatatcaacccccaccctactacccaagaatcaaggaaattcacacaagaggaaatggaaagcatgttggagcccagtgagtgaggaggagagctgtgaaatgctgacttctggatatggcatagctgttgaattatcaattcatatcagctccatggctacctatacaaaaatcaagccaatcaaaatatcaacagaatggaaggggggtgcccttgtcctgtccccaaccccctacccattggagaagttattggtagttgatggatgctgaaggaaagagaggcattctccttagaaaatgtgactgcaggtaggtttctcatggcccagtggatggtcatacgttcactcacatgtgggtaatacaaatagggctcaagattattaataacaaaaatttaaattgagggcagtatagagagttgggagaaggtagtggtagttggatatgatcaatatacattgtacaaatgtataagattttcaaaaacaaagcatatatatatatatattgagtgttctgaaatttgactcagtttatccataaagctcccacttgaaaaagggagtcaaagaaataatattaggctcatgataattaagggaaaaatgcccagttcaacagtgtgtcctttcctgtagaggttagctctgaagcttgaaaagagtcaaaactgcacataactaagttatccttgacaaatcttttggatgggtatttgtttactaaaatgcaatctcttaatcagactgaaagaatgcatcactgactgcagctgaggtccagtcagagagaggctggctgtgtttccaggccactctgggggaagaatgcaaaccactcattctgctgctgtcacacagagctcctgctgtaagaggcacttgggaatgaggacaggcagatttgcacctcccattcaccattcatttttcctcctgtacatccacagtgcagtggacaatggaatcactagcactagaaacctgtttcccctgtgtttcactgctactcctttcatcccacatgcatggccaaatgtataatacaggttgcaagctttaaagatgtggctcagatgtgcttgtgcctcccttttaaccccccacatagtaataaacccattggtctactagaacatctctcccctaagatcacaatgtgcaaagcagtacttagttttcctgcctttcaatcattgactgccaggagaggtctaattattactagccaaacagctatatcttcctttgagataatttcactaattctgagaaccaacattgctaggatcaggtcatgctaaccagtatagttactttactttattgtgcatttctaatggaaataaattcagtacatgctttactttgcaattccaaaaatagaatcctctctgactaaaattctgaaggaaaattaccatatacttgggcctgctcttatttattctgctccctgtgtgaaataattacaaatagaatttttagaaaatcttctgtacaattttaaaagggatgttctaagtcatgagaatgcattatcaagataaaatgtttatttgcaaagtacattttaatttgagctaggctcaataactatcagcaaattttacttggcctaacaaacaaaagctatgatataataatatcccacaaaaagctataataaaagagctataatagagtgttattctgcataaattttgtaattattaggccatgtaacttcggcaaacttttttgaagaattctctcttgccatcttatacaagttctgggatccctcactgcttatacttgcattatgcctccaaaaccaaaatataatatctgccacctcccaaacacacatggtcacaaaactttcatcctagaacatctcaagataccactgttcccacgaagcatcccctgagaaacaccctgttaaatacacatgagatgaaccagagtcagaatggtccatggtgatggaactgttctgaagtataaagatcaacacctgtggtcttcccccaaaggacatttacagacctgggccctgcctcccaacccatagattaataaagtagctgtttgtggaaggtctcagaaagttggattgaaaacaagaaggatacaatatgagcaagagtagagaaacgctgtcattaagtctacatctaagtatccatcaagcactcctttgagaacaaaccagcatatcttgctgagtctctctctctctctctctctctctctctctctctctctctctctctctctctctctctgtaggtccacattgtcctttgtagagaacaggccaacttcccctctatttatttgtggtcttactgggctagacataccttgccaccattatagatattcctaaaatcttactttgccccagtctttgacaaatcgaatcttaaggccagacaaaatgtacaacctatactatacatttctataggatgaaaaaaatgaatcaatctatgatgataaaaaatatatgatttctcattgcttcccacatcccctagtcagtcaaatatcatcccaggaatgatagttcatcctctctaaccatcccctgtattgataggccccaaataactatcaataccatattcctgtcataggccagctaaagccctcgtgtggatacttttgttttatttattttttttgttttgagtttcatgttgcccaagctggccctgagattgcaatgtagctaatgctggccttgaacagattctccagtttctacatccaaagtactgtagttagaggcctgtgccactcttggcttcttaatcctgtacttcagtcctaagtcattatcctgctaagtatgtccctttctcttagtccagagctttattcttgaatcctcagttacaattgagtattagcatttgcctgaaatatgttcaaagaggagtctaccttcaacttattgctgctacacaataaccactcagtggactcttattatctcatcttggacacaactttccatggctctaacattttattatatgttggcaaatccagttcctttttgttgggttcttcccccattggggtctactgactatctcatgactaggagctttgttaggcccttcacccattggggtctgctgaccatctcgtgactaggagcttacttcttgtttccctccttctgataaggcctgaatgaaagaatgaaaaatatctgcccattcttcttacctgaggggcctggggacatgaacatctgacctgggtagttttccaccatacctgctgactggcatataagctttccctcctttgtaataaacggcattctccttgcaagaatgacccgctgtcttgtctttatttgaatccttaggtcccttgcctgaatctgtgagaagtgttgtagcactggtgctacaccttttggttgtctgtcagggaggacctgaaaggtctcttttatctttttctccagtgttattttccaagactcctactccagttgttttccaagactcctattccagttgttttccaagactcctattccagttgttttccaagactcctattccagttgtcagatgctacagtgctccttgtccaaactccactagcatggatttcacatcagaatctccagtccttcttcgggatactgtggtgttactagtctttgttgcatatccacatcgaggtttcatagctttctttctaatatctggatgttgaagccctcccacctccattaattcataatttaggtcctagtatcaaccgtgataacaccaagaggtaaggtgcctgagaggtcattaagtcagaaggactagtactcaaagtattgtcgtacaaacttcccactgtccttctgtgggatagggctgtgaaagttaatctgcactgtcaacttgactgaacttggaatcctttaggagatacgcttcagacggggttagttgagattgaaagatgcactccaaatgtgggtggcccaattctattagcaggggccctagactgaattaaaatggaagtcagaattggcatttatcactctgtttcctaacacagatgcagtatgatgagctacctcacattcccatgactgttccttcctagtcatgaagaactagctccccttaaatcatgatctaaaaatcactataaaaaaaactaaataaatctttcttcctaacattttttttctttagcggagagggggttatttaatcacagcgaaaagaaaaactaatgcaatggtgttttcatttctgccatgtagggacacagccagtgatatctgtgaagcagtaggcttcacaggacaaacatgcctctatactgccagagcattgatcttaaccttcccagccctcagaaatgtgagaaagaagtttttttttttttgatgctcatacattactcagcctaagaaattttgctataatagctaaacagaaagagacatttcccaacatgccttatatctctgtatctgtgattaatgcccttcagttcacaattacttagcaacacattctgaactgaactggggtctctacatcattgtccaattatggctacataatttatactcacacaaaagaatgcattgtatcctgtgatctctcccagctcctgaactatatggactaatacagagtcaacaacatatgatcattcaaagctcattaaaatcctcctataatagcatacaaatcaaatattgagaagctacagttcttccactgataataaataagatacctaacttttctgtgcttgtttcttttcctgtcaaactgcaacaataggcatctcacaaagatcccgatagagccaatcagataaggcacacactctgttacatgtgactgatgctttctgggtccacccaccttggagaacttaaattttacattaatgggtctcatgatttgaaagtattacttgaatcgcagtaatcaggaaacaaagcattgcaataaaggaagaattcagtgtaccactgttatgataaagcaagtgggagaccttggcggattccatggcaggcaagggtgatggaggcaaagggacaaacatgccaggcagatagtgcttaagtgagaaattttattagaaagagaagggggaaaaaaagaaaagacgtatcacagagacagagagagaacagaaaagggaaacaggaaaagtcctgtctgccccatgggaacagcaggaaagagagagataaagacagagggaaatgagagagtggagagagaggagcaggaaagagagagcaggaaaagagcataagtaggcataggtctttcttttaaaggggtcctttgcacctgggctgaccagggtactacctaaatgcattccgccaggtgacaggggcaggccagcataatggctgaatccttacaaccactgtgctacaaaacgaagttttaaaatattttactatgtcaccaactcaacagttatcttaaagtgtgtcccagttaagagcactggctgctcttccagaggtactaagttcaattcccagcaaccacatggtggctcacaaccatccataatgggatctggttctctcttctagcctgcagcataaatgcagatagaacactgtataaaccgggtagtggtggtgcatgcctttaatcacagcacacagaactctgtgagtttgaggccagcctggtctacaaagcgagttccaggagaggccgcaaagctacgcagagaaatcctgtcttgaaacccatcccaaaaaattaatttcatttttaaaaaagtgtgtctctatctctctatctcaagatcttttcctgcaaaacaaaaataagggggaaaaaagcaaagcaggtgagctatgtttagcaatataccacaaattgaaaggaagagagaattaaagtgcagaggtttgctatgaagaagcaattaagttggcttgaagaagtccctggccagattaaaggcaaatgcagttaaaaattggaaaatatgagtcacaagtacaataataatgttctctaaacattctgttcatgatggaactaaagaaataaaccatttaggagaaattacagagctgaaatgctgcattgaagtatgaaattaataccaatacattcctgctacttctcaaggacagcttgttctcagtcattgaaaggactgctgtcatagcaatcaaaacctagtatccatcttcctttagaaaatcgattttccatatggattttccctgtcgctttccacagcacacctaagaatacacctcagaggtgaagagatgggtagcatctcccagctgttcagttctccactacccagtgtaggaccagccagcatggcagagggaacatcctggaggcctcagtatcattatccctgtagctgttctttacaaactaaagaagccctacacacacacacacacacacacacacacacacacacacacacacacacacacgttggcttaccaacccagctgtcacccaaagacacatccaaggctttgagttggcacagcctaacatctactactccatatatgacctactagagctcatgaacggttgggtcttgatgaaccatcgcttcaagatttcaatgactcagatcaacggcaggatatcagagggagcttccagtgaggatccaggattgacagtgtaccaaaggccagaagccttgaaccagaccaacaagtcactgcaatgaacatttgcaagtaaagggcaaagtcttatactcatgatacactgcagctcctaaggttactaaaacaaatgaatatgtgatggagagatgggaaagatggacaaataaaacattttcttctaaaggggtcaagaccaggctggagaaacccacagaaacagctgacctgaacaagggggagctcatggaccccagcctgatagctgggaaaccagcataggactgttccagacccccctgaaagagaatgtcagtgaggaggccttggaaacctaccagcctctggtagtggatcagtacttatccctagcatatgagtggactttgggagcctgttccacatagagggatactctctcagcctagacacacaggggagggcctaggccctgctccaaatgatatgagagactctgaggatcccccatggaaggcctcgccctccctgcagagcagaaagggtttatgataggtagagtgttaatggtgggacaggggaggaggggagggagagggaactaggattgacatgtaaaacaagcccgtttgtaatttaaatttaaaaatggaaaaaatattttcttttaatttcctttttggagggagaggctaaaggggtaggggattgggaaatgagtgggattggggtgcatgatgtgaaattcccaaagaatcaacacaaaaaaaaaaagtttaaaaaaatattcaaagccctctctccaacaattgttgccagagcttactatttgcatacttcatcctctgtggctccaggacaaagtttatatccactaccagtggggacatgcttgtttccagtctccctggccctttgtagttctccttccctgacttgaacactttttaaaatgcagtgaagagaatcctaaaactcccctgaggtgttgctgctgcttttctgttctgatggctgtcaccttaatgcaagtgctaataagcccaggcctgaagcttgccagctgcccctaatatctatgccagcctctgaactgctgagtgcaatgccacaggaatacccttctgtgccctcagcttccttggctaactcttcctacttcttatcctccaaattccacttccttcttcagtagtgtatatctccttccttaccatgtttttccaccttctaagtcttgaatcattgtacttatcatcctaaggactctaacaagcacgtgtctctccactttgtcttctcgtcaagccacagttctttgtctttggaatgctgcctaggactcatagataataacagtgaatttcttcttttctgtgtcttagactggagtctgaagagcccacagagagctctagagcatcgtgcatttgcttcaatggttctcaccatgcacttgcaaacacctgtgtggggaccacccaagtaacttgctaaaaatgaagactcttcaacctcaacatcagagccactgctcagaaattttagaataataatccaaaaccctgtcttcttaagagtcccaagattgcttgcatatttaactcaaggcccattagactactccaacgtccttatatgatacctagtaacataagctcatgaaatatatattgttccctctttattttgtttagttcctatgaaatggatggggattctgcacaattttctccagtttttgacataaggtctaagaactaagtgtttcatctaaggtcacacaggaagcagcatatttgactcaaggtcaattgtgactgagagtcagagaaatgttttcatagatttggggctgcagattagagaacaaggcagagcaggtgtagttgggcatggccaaccacatttacaagttcactttccactatgatgaagcaaagcatttgcaggctggcttttagccagagaaggaagaacctgcatgcacttggtaggttgatggagctaccgagcctgaatcactcacaaaaaaagcagaactgtaatgccaacgttcctatgacaacagactcttttgatcctatgaagtccatatccttgtttcttctagacactttcctgactgagtagagtgtttccaatgaacagaaaagcaaaacatccatctagctcagcaagtgttttcatcagggtcttcattcctggaagaaagtatgtctgtgacaatgaatatttttgtcacctccttgagggtgactcctttttagtaattgtttcttagacaatggcaaacttgggttcaactcaataatcatttagaaacatgagccaggctttcccagcgtgtccacaagggtctaattaaagcaacccttctgacagcacaaaacctccctgaaattcattttacccccacattatcccctgcattgcttccatgcaatgtttcttctttttgggttgtgtaaacacgatcagttgaaacgtagaataaagcaaaggcaatctgatggctgtttcagtaaatcagtatgtggatacatgtacatgaatgtttcaagccaaaatgtcccaaacctttggctcattgtgaattaaaacatggaaatgagtgactaatacctgggaaggctttcaggaaccaggaaaccttattttcttctgagggagacacaaagtcatgtgaacctgtaaagtttccccttttcccattgcgtgaggaggatttcacccctgccccacccccacccccaccccctgcacttgaccctggaaaggcaggtccacgagaaactgcctaggggactttggatttggggataaaacagggctttaattatggcaaatcttgacgctgaagctctactgactttcacattttaattttcttattcattagcttggtttcctttgcttattcctttgaattcagtgagctttcaccttttcctatacagagatctgctgggtactatttttttctatacacaggtagtgagtccttgtcttaagatatcaatcagctttgtttcttataccagacaaaaaccatctgcccaagggtggaaccacccacagtggcctaggttctcccaaatcaatcactaaacaatcactaaacgtgcccatggccatcctgagaaaagtaattcctcaacttgggttccgtattccaaggtaaccgtagcttgtgtgaagtttacaaagccaagcagcacaggtcatctctttaacatcggtgaactagaatcatgaaatgaagactcttgcccagcatacatacaatgtatatagttcagcagttaagtggcatgcccataatatacacgataatgatgaaactgaaaattatccaacacactgtagcaaaacatctcattcaatttcttttcccccatctccctctatctgctgtacaagtacagacagaaaactgagctcagaagtggtttaacaactccatttctaaacacactatttcctaagtttttgaagctattacctaagtgttattctatttctacttttaaacactccaagtacttcaaagagtctaaagagattagatattcgatataataatttgtttgctatcgcacactgcagcaggaactaaaatgacatggggagtaatagttacaacctgagatgccatctatatgtgatcatctgagccttttacctttccctacccacttccttttctccgcctttagatcagtaaacaaatacaggcatgtgtgatgctttaaaatagccaaagaaattcatgtcaaaagaatatacgcagaaaataaacaagggttggggataccaatgaaaactgtccttttctggcccttcaagctcctaaagacactttattgctttcacaagcctgccattctgatcataccatgcttgtgtcacaaaaggaacagtgtcctcaggagcctaggctgggcagaactggaataggccctcagaggccactgccatccttgagtcattgccatgggagacaggagggttttctactgctttgatacctgagcatccgcatcaaggactcacctacgatcctgggtctagaagacagggagagttcagggtcatcctgcttgctacagggactgaattgggggttttcttccatatctttctattctattttttaaaagagatacctgtctgttgtgacagtgaagactgggaggtgctgtggggacacaaacattcctgtcaatttaaggaacttttgcttaaaactaacaaaagcatgaaaagaaactaaccaacaaaaaatgtgttatctttcataacagaatcaaaagtgtgtatttctagagcagctaaccaccctgcttccccatatcatcagggatataggggctttcttctcatgactctcattcttgggaatggcttttatgaaggtaaatgaccatagaagttccaagaatgaatccagacttggcaacttgcaacatgtcctcatgagtcctaggcaagcactctgatacctgaaaatagccttagtcccttcctttcttttatcttgaggcacagtctcactaaattgtacaattgtccagattgtccttgtggttgtttgaaagaaaatgacccccaaagggagtggcactattgggagttgtgactttgttggtgtaggtataatcttggaggaagtatgtcactatggaggtggctttgaggtctcatatattctcaagccattcccagtgagacataccacttccttttgcctgcaagatgtaggactctcagctacttcccagcactgggcagaactggaataggccctcagaggccactgccatccttgaatcattgccatgggagacatatgtctgcctatacaccacaatgtcccaccatgatgataacagactgaacctctgaactgtaagcaagccactccgattaaatgttatctttggtaagagtttctatggtcatggctggctctgtaacccaagcaagcatcgaacttttaatccttctgcctcagtttcccatgttgctagaactactagactatgtcaccaggtctatatttttgtgatttttttaaaaaaaatatcaaactaaaactacttcatgtgcagggtgagaaaaagggagccaatttcattcttctatgtgctgatgtccaggtttacccacaccatttgttgtagttttgtggatttatatgtgttttatagtcaactccattgatctatgtgtctattttcatgccacttccatgctacttttattactatatttctgtggtccagtttgaaataaggtgtggtgatgcttcccacagtatcctttttgctcaggattgtttggctaccttgaccttttgtcattccatatgaattttaagattttattctatgtctgtgatgaatgtctctgagactttgattgtgattcctttgaaactatagattgcctttggtagcatgtccatttgggggaagggactcataaggccctaccacatcctgatgatctgttgaccatcaaaagagagggggtaaatatgatatccaattttgtacccactggtatgcccatgagtttctaatggctagttacaaactcccagtcacatagacagccctgattacattttgtatgatgttaaacaaaatcaaaactaataggagaaagagacctagtagctcagtgcttgtacagagaatgggaagggggatcaaaatatagtgtagatgtaggaagcatgaataaacaagatttagtaagaaaaaatcctccagtttctctagaagagttctcttcatatctcactgtccagagcattcccaagccatcatgttaccagagtgctcactgtgccctataaagagtttgtcttccagtacaatgacttacatcattcatcccaagggtctttagaaactgttgttttattaccatcactccttaagattttaaatgagtgtcttgttttagagaacatgtgtagaagagcttatagttaaaagcaagaaattattgacggcataaattcaaaccaagggttgttctccccatactccaccccagtgacctaatagctatgattgcttggcaaattaatcttatgagaaacttagcgtgaaactccatcctgaactcctgatctctgactgttttagaccagtagagaaaagaaaaacctaggtagatagtggtagaagattttgtgaaagagaagcagggttgaagaggcaattttcggaagtttagtgaagaacacagccagaaggagaagttagtcttcacactgcctggaaagatttgtcacaaaaggctcttttggaattctagactacaaacacttagtcttgacatccagaagaaaattaatggctcctcgaagtttaaaataataatagtaatagagaccaaaaaacgaaaagaaaagtataaattatgtgccagcatttttgaagtatttcctcattagcaaaaggcaatgaatgtcttttgttcttaagtaattcagtctaatactgaattatattacattactactagagaggcgaggtaggatgataaccacaaggccagtttgggctacataaaaatatccatggccagcctacactgcacagtgagaccctgtctcagaacaaacaaagtaacttctcattcattatgttatagtgcttaaaataaaaatacaacagacagaataaaatcacctgaagtgtgggtgaatcagtaggtctagacttggcatagaagcacccttctcactagatgtgtgatcttgagtgtgtcagctcctacctgtgaactttgtcttctttctgagaaaaactaaggacctcaataattattttgtaaaaattaataagctggcatatgtgaaaattccctatgtgccttggttgatattcttgtctagggtttcagacccagtgcatgccacacaatctttcctctattctaaccagagagtgtgagggtaatgaatgtccaaggctcttcctatatgtgaagtcaccatttgtttggctgatctgtgacccaccaagtctctgtggccccagtgtgtctgtagggcacagatattgggcatgtttctcaccaggggaaatctcataccaccatatgggaagtccccatggtgatttgtttcagaaggcattggagcacaatgacacagtgacagtctgggagaaaggaatgagtttttatgttgtttacaaaagaatagaatgaccctggctgtgtcataactcaacagattgaaatgtttattgcaagctgccagagtcccgaaacttggctcaagtaatctttagaagttggtcacgaaataccatttactcacactcttcctcatgatggtattaaaacatcagggaatccattatgttttccaacaggtaaacaatttatttatgcttgttaataaaatggtagccagtttccccagtttgacaacagcataagactgaattacataaaaactaaatgagaggcacagacaaatatatgtatggttatctggttttcaccgttcctcactttggttagaatgactaaaacaatgccagtgcatcatcacagcagagaaacttctagaaaaagcaccttcccaaatgcccataggacttataggtccataaaggaaacctctactcaccagtagctcctctggcatttgttgatttgtagaaccaacacattgtggcttccttactctgtgtaaattaaatggctcagggctggaagagaggagggctggagaccagcttgtctgaccatgttcacagcatatggaatcatcaaagaggcagaaaatgcttctgtccagtgtaccttacaaattattttactggggcctggagcaatgtttcactggttaagagcacttactgctcttgagaatctaattcaggtctaagtaccaatgcagtggttcagatccatttttaactccagtttcagagaatcctttactctcttccaacttctacaagcaccagacacacgtgtggtatacatacatacgtacgtacagacagacagacaaaacacttctacacataaaacaaagctaaataaatcatttaaaaacctttttattatattattgaaggtttattgaacagtttcacctccttggaattcacacaacaaactttagttttctggactaatttcccattagtgttaagttaaattccatttcccatctaataataataatttagggagattttggaagtccctagtccattttaatttcataatcccatttcaaattctcacttgtgccctttgaaggttagtagctcagaatgtctgacgttttatgtacatttagctcttctagtctctctagcacttaggcaaagaagagggatgaatacataacaaattactcctcacactgttgttggtaacaattcactttcctcgttctctagaatccaggagcaagttacccgagcattcttgctcggtattacttgtatgactgtagcaaagacactggctatgactcagggtctactttctcagtggttcattacatgactgtcatgttattgctagtaactggcaggaggctcagttctctttacatggaacactctatagcattatttgagtgttattgtagcagagcatgtggcacctccagaaataattttaaaagcctagagaagtaataatacatttttaattttttcattaaaatgtaaccataccttccctcccccttttcttcactctaacctatctcatgtactctcccctactccttgcctgtcccttttttctggaatataatgaattttgtgagttaatcttggaagtctcctattgttttttttttccacagtattctgataagcttccttcactataggaaagaactatacaaggttgcaatcactagacagcagctattattctggtttgacctggaaactgtctaccatccttggataaaggcaagcagttctctctttctattgatgttcccacttctgccagcaccctctgaccttcattgtcttctgtatggtaggctcctgtgttaaatgtctgtaatttataacaaatgcttgagattaaccaacttcaaaaggagatttattttggcccagagttctgaagatttcagtgcatgaccagttggccctgtagcatttgggcctctgacaaaacaatgattaatagtaaagcttccagtagagtagagccatttgccttgaggaagcagagagaaagggtaacagaccaagctgtcaaaagtgtacttccaattccctaaagatgtcctactacccacctcttagaggttctgctacctccaacagcactacaacctcctgacatcaccactacctcccaaaatcaccactacctccaacagcattactacctcccaacagcattactacctcctaacagcaccacaacttctcaacagcatcacaacctcccaacaacaccacaacctcccaaaagcaccactacctcccaacaacaccacaacttcccaacagcatcacaaccttcctacatcaccacaacctcccaacaacaccactaactaccaacagcatcactacctccctacagcaccacaacctcccaagatcactactctggaaataagcaagagcctttgggagacattttaagcccaaatacatcaatattctaatgatgagtaccatcattggggtttatgctttacaaagccttcatactcagaatctcctaacatcaaaaatttgattctgctccaccttgttcattcatccactatcattcacccatagccaatgtgttttgcgtctatcatcctgcacaaaactcaagtccaagtggatcaaagacctcaaccagttacactgaagctaacagaagagaaagtgggaagtagccttgaatacattagcacaggaaaccacttctaaatataacaccagtagcacagaccctgagagcaacaatcaataaatgggacctcttgaaactgaacatcttctttaagacaaagacacagtcaataagctaaaacagcagcctagagaatggggaaagatcttcaccaaccccacatctgacaaagggcttatctccaaaatacataaagaactcaagaaactagacttcaaaataccaaataatctaatttaaaatatggtacagatctaaacagaattctcaatggaagaatttcaaatgtgtagaagatagttaaggaattgctcaacatgcttagttatctggaagatataagtcaaaatgactctgagatgccactgtacacctattagaatggctaagatcaaaaacactaatgatagcttatgttggaaaggatgtagagtaaagggaacactcttccactgctggtgggagtacaaacttttacagtatgccagtttctcagaaaattgttaatcaatctacttcaagacccaacattaccattcttgggcatacacccaaaggatggtcaattataccacaagggcacttgctcaactatgtttataacagcattatttgtcatagccagaatctagaaacaaccaaatgcccctcaatcaaagaatggacaaagaaaatgtggttcatttccacaatggagtattgttcagtagaaaaaaatttaaaatgaaatttgcaggcaaatggatagaactagaaaaaatcatcctgcgtgaagaaacccagacccagaaagacaaacatagtatgtactcactcataagtggatcctagatgtaaagcaaaggatagccagaccacaatccacagctccagagaagctaggtattaaggaggatactaagagagatgcatggattgccctagaaaggggaaatagatgatatatcctgggtaagatggggggagcagtagaggggagaggatgggggatgaaaacatgagggaataggatggtcacgttgggggaggcacagagagggggagcaatgaaagagatatcttgatagagggagacactataaggctagggcagaacctaagtggggaaattcccaggaatccacaaggatgactccagctaaaactcctagcaatagtggagagggcacctgaactggtcttcccctgtaatcagattggcgactaccctgtcatcatagaacctttatccagtaactggtggaagcagatgcagagatccatagccaagcaccaggctgagctcctggagtccagttgaagagagggaggagggactatgtgagcaagggggtgtcaagatcatgatggggaaacccacagacacagctgacatgagcatgtgggagctcacagactctagagcaataactggggagcccacatgggacctaactaagccctctacatgtgggcaacagatgtatagcttggtctgtttgtggtgctctatagcttggtctgttgtggtgccccttgcagtgaaaccaggatctatccctggtgcatgagctggctttgtgaagtccattccctatggtggaatgccttgctcagccttgattcacggaggaggaactggtcctgtctcaactgaatgtgccaagttttgttgactcctcatgggaatccttatcctttctgaggagtaggtgggttatacagttgggggaagtggggagaaaggaaggaggtgagggaagaactgtggttggtatgtaaagtgaacttaaattttttaaataaaaaaatacataaatccagaatgtacccttcttgggtaaagatagaaaacttgtttattctgccttctgttatatccactcagtattagaaatcatgtcttcttgacatgtcacaggtcaatgtatgtgttctccactgttactcctcttcatgaccactatttttctcgcctacaccataacaaataatcacagagacataaaaatgttctcagggctggagagatggatcagcacttaagaacactggctgctttcatcaaggatcagttcgattcccaccactcacatggtagcttacaaccacctgtaattatagttaaagggtatctggtgccctcttctcttctgacctctgcaggcaccagaaattcatgtagtacacggacaaacatgtaggcaaaatatacatgtaaaataaaaagtaaacacttttttaaaagaacatgtcaaaatgggcaacaaaattattccaattttcactatttgaaatcacctcctgctttcacaggtgattctcttctcaccgagtatccttccttgtatggaagagaacgaaggctaccagacaatcccagaggaccatgcagattctttctcaccagctcttgtcagagaccaggaagactggtgacaagcagtaatgaaacaggttttactatatgttcatttgttgttttgttgcttagttgcttggttgcttgattggctgaaataaggtctcactgtgtaacttaggttgtccttgaactcagcatccttaattctgcaatttcaggggtgtactaccacaactatctcttgatttcactgaatgaacttgcctcttaatgaatggacaaaccctacaaggatgtttctgagcccaaatctgaggccggtttgcagcctcaggctgcatttagcaagcttgtatctcaggtttgcctgaccataatccaatgactattggagattttctacatgagttaagcataaataatagtcagcctgcatgtaacggagtccttttcaacttagagtaggatttgctttgtagctaatcttttctttctcctcctgtggcatcttagaatgtttttctgatacttggacaaagaatccttctttgtcaagagagttctaggtcaactaaaactaaaccaaggacagggaagaggctgcatctcagatatcaaactgtatgatcctcactcacttgttgaaaaattatgctgatgacggcatcactaactgcaagcttagggtaagagaagatgtcatcagttatcagtgttacatcagactctcaggtagaaaagcataggaaagaaatccatatatctcctagctttaatttatatacttccagtttcccaatgagaacttctttatccaattcaccttttctttccataggaagaatttttccaaaacgaataagccaacctctgtgtggaccatttgttctccagtagtgctacagtctacgcctactaacactgacaatggccacaggtctttaggttcaaatttttacacaaatttcctttagtttttatttcagacatcaatatacattctgcacatcattatcttgaatgctgggatccaacttaaatttaatcaagccacaacaagtttctaaaatgatgtaccaattatcttgctcaagattgtcaattatgaagcctatgaataattcctccttaaccaaagctttatttcaccttgacatcagtctttggtttgcttcaacttttctttaattcctcttaaagggaaagctactgtaaatttgaaccccagaaaaatttcctaagactttgccttaaaataaaggacatgtaaatgtcactatagttagttttaaacagtttataaaaagaagctagaagccaatatattggactcaaatgtataagctactccaaatttaagaaaactattattttgctacctttctgtcttagctagggtttccattgctttgatggaacaccatgaccaaaaaccaaattgggcaggaagggatttatttggcttatacttcagaattgctgttcatcactgaagaaagtcagaacaggaacttaaacagagcaggttcccagaggcagaagctgatgtagaagccatggaggatgctgcttactgatttgcatcccatgacttgttcaacccaccttcttatagagcccaggaccagcagcccagaaatggcaccatccactgtgggctgtgcccttcttcattgatcactaaatgagaaaataccttataactgcatctcattgagacatttcctcagctgagtctccttcctctgatggctagtctagcttgtgtcgacacacaaaaccagccagtacacttgcttagtaagaattaatgataattctttctccatggagagcctgatcatttgtccacaacataaaaatgtagaatactgttttccttactctcctccactttttattacttttgtctttcctggaaggaagggctattttatgagagagtgaattatggaatacagaaattgaaaggttcaggcatcaatgctgaccttcccgtacctctttaagcgacagaccccgacctctgacaacagttggggcaggcacagggacatgctatgccatcaccactcatcacatattatggacctgcctgaggacactgcacatgtgtgaagcctcagtgcacatgcgtggtcttccctttaaaagttccaacttcctcccgctccttctcttctctctgtggtgaccgaccatggcagttagccattaactctgactctcttctctcttactctctgccctgctctgttcttctattactctctctgttctgccaggcctataataaactatggttaatgtatctcttaatctcatgtctcatcttgcacccttctttctaatttaagcagaaatctaacagaaatagcaagaaaatgtatcatcagtgtcttagttaaggtttctgttgctgtgatgaaacaccatgaccaaagcaacttggggaggaaagggtttgtttggcttatgctttcacatcactgttcatcactgaaggaaatcaggacaagaactcaaaacagggcaggaacatagagacaggagctgatgcagaggccgtggagggctcctgcttgccgacttactccctctaacttgcacaacttgctttcttatagaacccaggatcataagcgcaagggaagccccacccacaatggtctgagccctttctcatcaaccactaattaagaaaatgccctataggcctgcctatagtacaacctctctgtgttttttaaattaatttatttattttacatctgaccccagttgcacctcccttctttcctcccacacctcatcccaaatcccttcctcctccatttctattcagtaaagggaagacctcccatggatatatcaacaaaacatgacatatcaagttgcagtaagtttaagcacctccccttgtattaaggctgggcaaggtaacccagtatgagaagtacggccccacaagccagacaaagagttagaaacagcccctattcccactcccaggaatctcacaagaagaccaagccacacaactgtcacatatatgcagagggcctaatcagtcccatgcaggctccctggttgtcggttcagactctgtggactcctatgaacctagattagttgattctgcaggttttcttatgatatccttgacacctctggctcctacaacccttcctctcttcagcaggattccccgtgcgtctccacatttatttctatcatttgctgaatgaaacacttaaaaaaaaatgtgcaacatccttagccatcaggaaaatgtaaatcaaaacgactctgagatttccatctatagctcaaacttattgagacataagcttcttcctctccagtgactctagcttatgtcaaagtgacataaaactagcgagcataattatatttgagcaacaagaacttagaagcaatgagatttgtttgtcttctgactggtattctcaggagatgaaatgacaaactacatcagtggcatataatctcttcctccaataagaagcccaggactgccatgatgttgaaaaacaagtggttgcctacaagttgaaacctggtcatcaaagttgacaagggtaaatgtataaaaagagtatgggaagcatagagaaagacaaaggtaagaacagcaaaagaaggaactctttggcatggaatagttacagatttttgtaaatttttggcaacttcagaagaaaataaacatatatatgagtgtgcttatgtgcacgtacacacacacacacacacacacacacacacacacacacacacacacatatgaacagagagagaaggggggggagagagagagacttcctagcattctttgaactctcaacatgttgtcaactagttgaaaacactgttgttttcttttagttaagtacttatgcctggatgcccttccagataaaatagataaaactatagaatgaattaatatgctggttctccaaagcctgaagctgacttttgtagttttttttttttttttttttttttttgctctttggggacccaccacccagctctcaaataaacacatggatacttattctaacttatgaaagactgacctttgcttgactttgtttctggccagattttctaacttaaattatcccatttctctttaatcacattttgtctctgggctttttacctttatctattctatattctttctttccctcttactctgtgactggctatgtgtctggcccctggagtcctcgtctcctccttttctcacacttctcttttcttcttgagcttagtttattctctctgcatgccatcccagcctgtttttctctcctgaatagctattggccattcagctctttattagtccaatcaggcgttttagactggcaaagtaacacaggttcacagagttaaacaaattcaacataagagaaggcaatgcatctttgcatcattaaacataacacagcataaacaaatgtaacacatcttaaactatattccacagcagactttgaagatacaccttgaatgcatttcactccacttttcttaaaaatagcccagagccctcacattaaacttgtctgcccactcccaagcaagatgacaccaagccttaaaatcttcctcccttggtacccctttgccctgtcttcttctggacttggtcctttaaataatcttctgtttggcttgactccagtgttaatcttttctgctttagatcagatcaagcttcttcatcactggagcctttagatcaggtactaagaacatctacccttggcagccagccatttcctctggactcaattttcatttcctctgtcctgggtcagccccatacttagttaggattcttaggctccaaaaattggaaacacctttttaaaaggatgaacaaacactctcccaacatattgttgatttcttattcactacaccttaagaaccaatatatgtttactacaaaaaaagaaaaagaatgaattgtctacttatgatccatctctctaccagctgcacagagcatggggtgaggctggccttttctctaaatcattgtcttctgagaatcatcattctgcacagccacacactgtcagagactctgtacggccataaattagaaacttgtaaaatgaggacatattttgaagtcaagcctttgtctttttcaaaacagccattttatttttgcctatgaagtttgctgataagcctcctttgaaagtaagaagcaataagacaagatgcagtttagaagtaacactttttttccatgacctgatgagctagtagaaaacaaactctaaaacaaaacaaaacaaaaaacataatttcaaagctaccttcctcccaaattaggccctaattccttctgtcgaggtgtaattttggtgaccagggaaaagttgggcttgattttgttatttgtttgtttgtgtttaggtgacatacaaaaattgtaatgacatgaagaggtaatgagagtgatggaaaggcatctttaaccccactctcatgttgtgtccttctggagacatcagctactcacaatggcagcaagtacacaggctggagccaaccatccatcaatactccctgaaaaattttcctgtaaccagaactatttttttcagtaaaaagcatttctccaagaaagggaaaatccaaaccctgacctcacattacctgtaatttcttgagccaagacagacagcatgaattagacagaatacggaattgaatagatactctattctttggagaaatttctctttctagggtgagtaggcttgacagtcctagtgatcagacagcatacattttgaagatccttattcatagaaaacacgtgacccccatgtgccctgaactctctcacttgcccccacttccaacagcttctcttttctttctttgaaaacttccaatatctttagtttgtgacacaactaacaaacaagtcactgcaatagaaaatgttgtcactatgtctctagacatctccaaagtttacaaagcatttcacacttgtgatttcatgggttattctcaacagccatttgaagaatgcattagtggccacctttcatacatgagctaactgaggggctcagactttgtgcaaaaaaagtgcagcagtacagtgtgggacggggccaggttagggaagggtcactagtgagaagcccatggcaggttggtttaaaaaataaaagaaagcttcacacaatctttttaatgctattgtttgaaactgccagtgcttctttgtttctgcacctggcttgtggatccatggcgagtttgtccgctattacagtggccagtggtgggggaagagtctaacattctccttgtcgattcctggggaatgctgggaagttgcaagtgaggtcatgggattagggagttaaggatgacagtgatactaagctggccctgcagtgcaggagggtaagaagatgtggacgtcaggagggattccgattatgagacttttgtgactgaaaaaatccctgtccaaatcactgctgttggcgtttccacttttgctttttgcatgagccagaaatgttttcagtagtttattttcttccctttttttttctctaaaggaatggttatgtaaatctaatataatgcttaggaatcgagtgagtatacatggggactgtaagtgagacctggcaaagaattgagctgtgtagctaacacctctggatctgtagttatgcgcagaggcctttctgaaagctgtcctgtcttctcattcttctcacttaaccattcattgaccaagtgcttctttgtttcggggtactttgtgggacatttattaagtgctggaatttccacttcaggaattatttctgctactgcagtttcggtttctggttctacagcaagcacagtgttttcaatatcgttatgttgtgacgtaacttcaatgtcaggagaagatggctgtatgtctgaacacatgctgacagtcctttgtctgacagtgctgtccaatgtccagatcaacccattctacacatccccgaaaatgaccttgatgactccgactcaacaattggcttggctggcttcgatcctatgggaaaatcatctcctgttactcctttttgcttccttctacccattcctactacttccccatggttaaccaccctcctcccttccctccttgggctcctgatagggctcctcttgctaatctcctttgacccttgggcctttcattgacctgtggcctttgtcaagcaacaagtggactctgccaccaagcctgtcctggtccacttccccatggccagcttcagaggtgcagacctggatagtactgaaaggagaccttgtcttctgaggaatgtcttctgcatgcaatggggttgatgtcataaagcttccccacccccacaaaaggcatccggatgaccctgcctttcagatggctccaagaagccatccccgaggtcagagaaaaatgtcctttataaaatccacatcgattctccaattgggggccaggcctctatccccctctgctgaaaaatttggacacttctttttatacaaggaagggggaatatgttgggagccaaatctcagggctgggcatgagatcctaggccatgcttggcagggcacatagttaacctttacatagcagctccttagaacctcagctcaagaaaagaaacaacctgacccagtcctccacccacaggctcagttacctaagcaaccccttcttggacctcttactcatgaactctttaccctgccaaacatcctctttgtggcttccgaatatcctgcctacactaacacctgatgcacaaacaacccattttgcccctccccatatcttgactttataagctagcttgagaaaagtaaagtttgacacttgatcagaatcctgtcttgtggtcgttctttctgcgtctcttgttcccattccctatccctgactctcttgccccaggttgatgtcctgtaggtcgggacacttatcaatattttcctttaaaaacagaagagagaaagaatcccgtagcttatcaaggaaaagaaacatcaaacatctctggaaaatcagtttgctggtgaactagaattttacattggtgatctaaatatcttaactcaatgaattaacaaggagacaaacagacttgggaatgaccacaatgagttaccatatattctcatgcccttaccaaggactcaagaatatgggagaaatcacacctagtatctcagacttccccctttgcctaattttgccacctagaggcaaaattcacatgaaaaaaatagtattaaggtacagtatatgccagaaaaagtactttaaaactttaacaataatgagtcatctaaagatcttgttgaaatacagatcatgactcaaacctgcagtcagacgacagtcactaaattcaaccaccatattgtttgagacaggaaattacctctcctacagaaaaggtaggtaaccaagtagtgcagaacacagtcaccaatcagaacaggaagtgaactagttcctgggagccgggggcaggggtgcttttatagtagatttgtttaaaatgtgcaatcaggtgaaggtgtatctgtatcacagatgaatacaagattacaaggactatttctaaaaaaatagaaactgtttttctgaagctattaactgggaaagataagcaacacaaacaccaattgctacgctattttgctaggaccacagcctgagtatttttggcatatagtcaaaaataggatctctctgtaaaacttggaaataaggggtcacatgccagcatgtattgggaaattaatataatcagggagttaaactctcactgaactgaaacagatatgcaaagccatcttaggagaggcagagacactccaaagcccacagcacctggctcggtctaattagaggaagaactgtgacatctaaggaaaagaagtagcccttgtaaagaagttggccagcatggatgctcatcaaaggttaatcacagcatctggctttgggtctgtttgcaggagagaaagccccagttcaagagtatagggaagttggcataaatagcatctaccctcataataggaaagtcacatctacagggcagtgctaatagtcttgttgagggaaaaagattgtactaagccaaaggaccatggtttgtttctacagagtgagctgcggcagctttggcaccacagtttgaagacgggttatatggctcacaaaacctaaaatatttactgtctgactcttagaagaagaactttcaaaaccttataaaacttacagccatggaattggttcccctcattttgattctatgccccttaagcaaccttctagtttctagtttagtttcccaggtcagacagcaacaacagaaagtgtcttgctcagctcttgggtatttctacttatttctagcctagtttgaggttatttttccccatagtgtcagggagcttactctatctgaatcatttccatgagtaatggtttcattttcaatacgctttttaaaaaagagaataaaaagcacttccctaagcttacatggcaatcagtttggcatgtcatctgtggcaggcttcttactcattctagaaaagacctttggaagttaaaggctagcagcaggccaaggcccaaagttgcacttcatagggttctgtttactttggttgccataggaacgagacccagctctactgctttgctcccaactggggagccagactctctctgcagcttcctatgtgttatgacgatgtttcatttctggttcatatcaggtgtctgccttatttttaaagttgactttgtctcttatctctttctgtgtttttatctgaatttgaagtccttctgtgtctggaacagatggatagtatcatggtaggagcagactacactgtgttaattgcaaaccttttagtgattcccaccaggattcatttctttcctctaattccctggctattttatcaccgtgtaaccaacatttattgaatgtatactacattgtagacactattgtctaacttagtagtctgcagaaaacatgtacataactttgttgcctttggagagttcacagtgaactgtactatttgacaattcaccccaaagattagaaaatgattgacaaattgacatttccccggttaaggctcattctcattaccaccaggaaaaataaccaggatttcccccttcagtggcattttatgattcctctttgcatattaagctactccacctcttccaaatttacttaacatccaagttactactctgttctcctgggtcctccacaataatcttgataacaaagtcacagattaacactttgataaccaacaagacaaggtaagacttaattttcaagtcactgagaaccttccttatttgtaatttgttgcttaattacatgttctacaaatgtaataacaatctccctcacccctcctcagggcagcatttttgagcagagtagagaaatggatagccccctgctctgccccaggctcattataagtttctctgcttcacattgaaaactatccaattgtcttcagcttccatcttaggcagtcccaagccttctctcagggtcatctggagtttggtctgttgtcaccttcagtacagcagtctgcaaatacagaatccacattgtttctagtgctttgcatgctttgcgtggcttctgtggccttacagttatcagtgtcatctgagtactcagcaataactctcccatttagaagataaagagcaaaaggaggaggaaactgtgcatatagctgaatcaaataggagctcttccagtatttttcaatacagaataatacaaacctcttagccattaaatggaagcttaagacaaagtgcttgaaattacctgtcatcacagatacttactggtggaaaataaaggcctccacagtgtatttccagctaacctcaatgccacctagtggtcattgaggaaatttagtatcagaaaatgggcagcaactttagaaattttttaaaaagtattaatattctctctttcacatcacgcatctccatcccagtcatttccccatcttttcatatccaccctctgcctttgcaacatttgcatgatgttaaagacacaaaaaataagtaaaaaggagaccaaaagaaaaaaaaaagcaaggtggtggtggcacacacctaaatcccagcacacaggctgaggcagaggccagcctggtctacaaagcaagttccaggaaagtcagagctgttacaaagagaaaccccatctcataaaaaaaagattcctttcatggggctggagagatggctcagtggtcaggagcactgactgctcttcaagaggacccagcaccctcatggtagctcacaactgtctgtaaccccagctccaggggatctgacacctcacatagacatacatgcaggcaaaacacaaatgcacataaaataagtaatttttaaaaaagaaaattttaataatgacaataattgctcagacttattgtctacagtgttctttgactctgtgctcacgactgtgtgtgcattatctaatttcttctcttttttaatttccatgtttttgttttgttttgaacataattttgattgattctttgagaatttcgcatcatgcatcccaatgtctctcacctctgagtccctccatatctgcccctcagccctgcagcatgccccaccccgcaaaataaaacaaaaaaaattaattaaaaacaaaacagccaaaaaatgactttgctcttccaacttcccaacacctcttcattcattctagtggcatcaggagctatggtgtatcacacactgtacccttttgtccactcagtccaatcaatcacaaaatgttcattgcaatgagtcctccatctggttcaagacctctggcactccaacaggtcatagatggtgtagatattaagggtggccaacccaaggctcagctgtgtgtccatgacagctgggctggtcagtcccggccactgagaccagccttctcaggggaggagcagagccagctctcctaggcccacgacagctctccccctcaatcggtgaggatgggatcagagcacagccagccacagagaacctgaacagcagacagaaagggcagggcgttctgctcccggactcttttctgtgctatcaatggaatttagtttaaaggccacattcagcctttttaaaaattactttgaacaaatcacttttacttaaaatactgaaactatgtgatatttgaattgttttgaagaaccaggactaataatgactgctaattgaagttttattggtacttatgaataattcaaatgtgccttaaatagtcttttttagtgtgtgctagggtataaaaataatattatagaaaataaaataaaaaggagcatagaaagagagatgcttcatctatctatccccctctgattagtccatcttgtttcctccttagtgttgcttccacttccatatcatatatgcataaagattttatgtatttatattaagaagtggggaccatgcagggcggtggtggtccttgcctataatcccagaactcgggaggcagaagcaggcagatctctgtaagttcaaggccaactttgactgcagagctagttccagagctgttacagagaaagtctgtctggaaaaaagaaaaagtaaacaacaagaagtggggaaccgtaaatgacagaaacatatttgtctttctgaaactagcttaactcagttacatttcctaaaaacatcactttgttcttcatgttagaaaacaagcattgtcattgtgtatatacagcaccttttatttatttattcctcagttagacaccaaggctgcttccagaacttagctacattgtgaatggagcttcaataagcatgagtgtgtgcagatcctatgatatgttctctatggccttgcagtcattgggtagacacctaagagatccttgctgggtctgagactgagtctgttttagctttttgaggaaacaccatctcgatttccgtagtgacaggactagtttacatacccaccaacagtggtaagggttccctttagtccacaattcttgatagcatttgctgttcattttcttgttgaatgagatgaaatgccaatgtcccttcaacttgcactttctctgatagttagtgaggccagacttattttatccctgcttctcatttgcactttctaagaaccgtctatatatctcatcagtccattcattgattaggtgtttgatttcttattgcttcattatgagagttctttgaatattgtgagtattaattctctgtcagatatatagctagtaaagattttctcttgttttgtaggccgtctcttcatttaattgtttactgtggagaagcttttaaattacatgaactcctatttatcaattgttaccatcatttactgagcaattagtcctgttcagaaatcccttacctatgatatttgtattttgaagtgttttccctcaaacttctagaggaagtttatatttaactcttagtggctggtcttacatagagatatttgatctagttggagttttctagatcaggtttttgtttgttttgttttgttttaacatgtgactatccaattctcccaactttattttttcaagaggcttcttctcttgtttgcattttggcatctttatcatatatcaggtgaatatagctttgtttggttggatctgggtcctgtgttctattccttgatctattctatttgctcttctacctgcatgatgctcttttttcttggctatatgattcatcctctgagttgtgatcactggggctgtctcaggatcactgtgccattccagagtcattcctgattctgtatggattttaaggtatttttactctttctgtgaaatgtggcattgggatttcaatgggattgcattgactcagtagactggccattctcacactattcgtcctcccaattagtgaaaagatcttcccatcctcaggtctctttgttaatttcttcttcagagtcttacctctttcatttaagaaatctttcaagtccatgattaatctttctaagatctttctcaggacactgggaatggaacttccctgattcattttgggatatgcttgtcctcaggatacagaaaggctccctgtttcatatgttaattttgtatcctgccacttttctgaatcagatctagaaggtttctcatggagtcttatatttttggttgtgagcctggcctttaatggctgagccatctctccagtctacccagtgaagtcctgaggatctcttgtgtacagtcatgtcatatacaagggatattttgatttcttcctttattattttatcccttttgtttccttcttctgtcttatttctctagctaacacttcaagtactaaactgaaaagagtggagaaagtatacaaccatatcttgttactgattgtaatggaagcactttgagttttccccaatttagtatgacagtggctatgggcttgttgtatactcccttttttatgctgggatatgtaatttctattcctagaatcttcaggcattttatcacaaaaagatgttagaatttatttaaaaaacagcaacacaaaaacaaaaacctttcttgtagagatgattatgtgacttctgtccctgagcccttttatttgatatattacatttagtgattttaaaatgttgaacaatctctgaatgtctagagtgaagtcagtttgaagattgtgaataataattagatatgttcctgaattcaatttccaagtattttattgagagtttttacatctatgttcatcaggtatattgacttatataacctattgttgttgtatctttctcgggttttggtatcaaggtgataccagcttcttggaaagagttttgctaacatttcttcctattcttgtttatgcaacagtctgtaaagcttcactcttaattcttctttagaggtctgggagtagcagtgaatccacctggatggacatttttttagcttggagattttttttttttactgctggatcgattattattattattattattttgctcctaacagctatatttacagcacttacctcgtcatggtataactttggtaggtcatatgcatctagaaacttatacatttctttcccgtttttccaagttttagtggaatattagactttaaggaatgtcctaatgatttccagaattttatttgtgtctctgataatgtctctcttttcctcactatttttcatttgaatcttctctttcttcctttttcctaatttggctaagaattatcaatcttggttattttcaaataacagactcttgatttatttgagagaaaaataattttaaaaagtaccactcatacccacatctcatgagtcagaaataaataacatgaatgatttggaaaacttccctctaatcatctttcaatgcatattttacaaatataacattaacaattttataatttgcttattaaacatgataattattttccttattatagatattttgttcacaacattttacttgaaaacaataggtaatccctgttgatttgcatcatcccccaattattgaacacttgaattgtttccaatggttaaatacataacaaaaaacatatgactattaaacagtgcgacagggtggaatacatctttagctgaccttgactaccctatgtagccaaggataaccaccataccagttgatgtggccctggggagcaaacccagagctttctgcaagcactgcaccaacgaagcaacattccaagcatcataaaacctaaaccacagtttatccccagaacggaactcagtaaacagtaggctttcctgccacgtgactgagcaactaagacgggcttttgtatgtctgaagaaaatatttaggaaaataacaaagcaaattgcaaaagtaaaatcaatgctcaaaaacactgacgtctgcacccctcctgctctttcttgacttctgccaggaccttaaaaagaagttgatgtgtatttttgtcattttggagaatctcagcaaggcatcctcaagccccacttgtgaaatgatgtgtcacattaacacactttattggcttaatcttatacttcctaattgaataatttaatatttgtgacaccagcttgacttaatacacacacacacacacacacacacacacacgtatatacatacacacgcatatacatatacattcacacagagaagctgaaagctttgatatttctgttcttctttactttgagcataccttgtagcttcctaagctgatgtttggtgccatgccatttataagtgtcttctatctctttgacataggatgtctacttgatgtacataagagctgcaattttattctaataaggtactctttggtgaccatatatccaatcaagatgctatcactcctgaattgccacaggcattaacaagggaacagaaattgtatcctttgtgtgatgacggacaggtgatgtcctgaacgcagatgctggacttttcaagactttgacagctcctttgctcttcagccagcagtacaaatggtgattatatagactgggccatagtgaatgcattacttttagaccaactctggtggaaacctggaatgggttcaagatggtcctttcaaagtcaaattcactaggtttgaaccttctggacttactcacactctataaacaccctagggaaagtgagttatgttccctttccatagtcatttttttcatttttaaaggagggataatagtatgtaggtgtgtgtatatatatatttgaagttagcctacaccaaggatacaccacttctcccagaaaccatagatttccaaacaaaaggatcttctggggttgttggtcagaaaagactcccaaaacaatataggcctttgccactactcttgtttgtccagcagaattcaggggtaagatcctgtttctgatgaaacaacatactttagtcacaggacatggagaaatcaacttgatactggctagggggcttcttctcagctgactagctttcatagtaaaaggtggtgctatgtaggttgctggcaggaaacgtcatcaacaatcttactcatttgtaaaccctgtgaactgtaataataactagctgctaagataggcccacgggtgtaacaatgccaagaatattatgagattgaccaaacactttctgattgaatttaaggcctggtctataagagaaagtgcatgtctggttctgaaaatctggccaagaacccgttgttgagggattcacagaccccggggctgaccttattgctattatcctgctaaatgaccacattatcaaattgtctactaaaagtacagctctatacacatagattagtgcagctctcagacttcagacttcatcaaagtttttttttttttttcacagtggatggaggttaacacataactaatcaaaaggtaaagagtaagtatcagaggacttctgggccacaatatcacaggccctcgcaccacccacccccaatccccctgccctgaatgtcaagttcagactatcgtggaagaggtggcagaaagattgtaagagctgaagattacggaggcctgggacaaaacagttccttccgaacacggaaggggtggtgccccatgaacttacagcagccgtggtcacctgccaaagacctacacagtatcaagccagtcaacaccgaggcatgctcccacacttagctggtgagctattgacagttgatggcttctaggggaggtagagtcagtcttttttgagggcatggcctctggtgggtaaaccttgctccctccggtggatggccataagcacacatgcagcacaaaatgcacttggtaattcattgaaattttaaaaaatgaaacaaagttgagaggggtggggatgtaggcgtggctatgggaggaggagttagggaaggaatgtgggtgaatacaatcaaatatatggtatgatattctctgggttactaaaatactgtctaaaatagagctgacaattaagcctaccttatatgattgttgagagaataaaaatgatgtcattatacagattcctagcagtgtgctgtacatggaaagcattcaataaatctattattagtattacccatttgtatcaacatgctagatagtttacttctttagggttactctgatgataaggagaaatctacttttcagctatacttattcctctttaatagatggtcagaaatctggcatttacatgaatataaattagacatgcacagcccctggaaagggcaaaaggataagtggaaaattcttataatacaccatctactgactgtgtgtgatggcatgcccctgtactcccagctactcaagaaagactgaggtgaaaggatccttgagtctgtgagttatgagctgtagagcattgtgtctatcaagtgtctgcattcaatttgacttcaatgtggggaccttccaggagtaaggaaggcccagattgtcaagaaagaggtgaacagctctgggttagaagaggaacagaacaaaaccccaatgcttgtgagaattacctccagtagaggaaacatttcctgttattcacccttgctagggtccctatctgctctgctgaacagcaacaagtaaaatagtggagtgtgcacagagtttattacatagataaataaatgaacctaaaacaactcccagttgctctgattgtaatcttcatctcaattcaaataattatatctcctcatttttagtacaaatgaccagggtggacaatttgtaaacctttcctttactttatatttatcactaccattggcaagtaccaaagcatcttggccctcacagagaggtaaccacagagacccaacaggcctgagcacaaaatctgtaacatttctttctcttcaaagtaattactactcatcaattttggaagttgccaacttaataagcaaatcttactcagtggaaacttgagggtttgaagttgaaatgccattaaatctgcccttttctatgccatatgagacgtgattgtagctgtgagtggatatgaaatgctcacattttagttcatcaaacaattaaatggtgaattctcagcattttacttctggccagtccaaagctataatactacccacatcctattctcctctggccaagaaattctcctttcctctaataaaatccttcatttcttgttttatgatttttttatttgctgaacattaagtcagagcctattaaaacagcatccaatatataagcttgtatattatcccccttcagaaaatctgaaatggatctttgttgttacaatattaaaatatatcttaaatctaaggaggctatacatcttattttgtttaggatggtctgacttccacgatacttcatagttgtcttggaatttcatgatagtttgcctggacttccatgactcttagcatcgtgtgtgtgtgtgtgtgtgtgtgtgtgtgtgtgtgtgtgtgtgtgtgtgtgtgtgttgaatacaagtgcatacatttatatatacaggtacagttgtgtatgtaggttcttgtggagattcatttggaggccagagtgatggaggaggtccttctgtgtatatgtttgtcttattggttgataaataaagcactgttggccagtagggaaacaacttaggtgggactagaagagaaggaggattctgggaaatgtaggaaagggagagagtcgccatatgatcccagaaagcgaggacacacaaggccagagtcctcagtaagataagtccttataaaatatatagattagtagttacagttgataattaagactgagctagaaaataagaaatcctagtcattagccagcagcattgtaactaatataagactctgtgtgttatttgggagccctaaagcggtggcagaacccaggctgctatcggaaagacttatcattacaaaatggcgcccacatggttttacgaacttccacacaaaaccttaagaagagattttagaaacaaaaagaacagaggcaaacacaatttcttgatagcacattttacaccaggggatgagttcaagtgtcttcttcagttgcttatccacttattttttgagacagagtctctcactcaacctggagctcactgatcagagttcactaacaatctctgggatctgcctgtctgcattctccagtaccagtgttacatgtacacactgtggtatccagctttcctatgggctctagagatctaaacttgggtccccatacttatgcaatgagcactttactcactgagccatctctccagctcctgctcttagtactttttttccagatttttttcacttgtaatgaagtgcaatcaatagcaattagcggcctggaaataagttaggtttggtcgaccttcaatttgcttccagctcccatcatgttttcaattagtgacagcatctgatatccacttacagcgaacagagccatttgaaattgtggctaaatctgaatgataacctgttatcaccctctcttttttcctaatccttttatagccatttcaaggacaggatccaacatggaaaaatgcagtgtgtttagtcctacaagtcttggattttccatgtacaaaatgtcatgcactaaatctaggagctttggggaaagcaagtcctgtggacagaaagatagttaaagttatccatgtaaagagaaataatgcatcaatttaatccaagggtcaagtggtatagaagatttaatttttaaattctacacattaattgttctttgaaatatcttgacttaagggaagatattttgatggagccatggagataaaagagagagtgcttcatataccaaacacagctaattaaataacagtggattcctcaaaagtaacataattccaagcagaaaaataaaatgtaaaaatttaaacccaggactatggtttgaatgtgtctcccaaatgtctggttctaaaagattggttccaaggtgtcagttctgatgaggtggagcctttaagaggtgaactgactgcaaaattattaggagcattgtcttcagaagaaagccatgcttatcttgcagacccagttcattggaataagtgttctcaattgggattttgtaatgtgagaccagttcatgcatggtgacagttttctttctatttctttgctatgtcatggcatagctgtaagaaccttatcagaggccacggaatcgaacaatcttgggttttcagcttccagaactgtgaactacacagattcctgttatagcaacagaatacacacagatacactgggaagactgccagataagagtagaatgatgacatatatagtcagatgagtccttaagaagtattcctcctatgctcttcttcagaaggctagatgtacctcacaaaaatgatggaaaactgaagaaaagagttcaggatcttgcagataggtgaagaaaagtctagggatgagcatgaatatagacttagagcaaagttgtatgactgaccttggcagcagtcaatacagacttaatgatgtgaaggtttctgacatcaggagtgtgtgaagttcgaagctaacttggtaggttataagtcagtacttttaatgtggcacttaataatttgggaaaacaagaagttgaacaagaaagaaaaaatcattaaaatgctatacacataaatgatcaccagtacttagattgcatgctatgatataatacttcttttattttctgagacaagattcctctatataacagtcctggctgtcctggaactcactctgtagaccatgctggccttgaactcacagaaatctgcctgcttctgccccctgagtgctggaattaaaggcatgaaccactactgcccaatgacataactatctttagggtgtgcagaaatacatgtttttaggtaagcgtgtgtactaataggtgtatatgtgtatgtgcctgtgtgtagaaattttaacaacattaccataagttaaattgaaaaagaaaagaataggtaatatgtaaaatcaagaagctcaaaacaaatagaagcatatgcaaaatgtttagagatgtggagttaaaacctgaagacattgctaacatagctgaaagtggttgtgtctggttgcataattgagtgatgaagaaaaaaaagaggcaaataactgttcttgtttgttattagcattaggatgctctttaacttaaacattatgtattgttttgactgaaaacgtagtatctttccaatttctcctccctgttgtcaactactgaaagagaaaggaatcttttgcaggtttgaaagaagacaataaggaattagaaaacaagaaacttgagtatccctgaggatagtgggaggaaaaaggtaacagaccctctggttagcttggagccagccctgcagaaaacagtgccaaagagcccctgttcagaatatggagcttggcacagtcatcagtcaagtccctcataatgacagctaagacatgagttgcaatctgtcatcagagtgcttcctgcaagcatctggaagagtgaacaaattctttggcaggcactggcagtagagatttgttgtaactctggaagtcagttacatcaggtaggctgttttgtgatgtcccattcttgttctgtaactttcttctctttctatgtctaggaaatgggaggacaagagttagataaaggactaataagtgtggtgtatgtctgcttgagtctctaggcaggaaggcatcagtgttgtgctattagctgtgatgtatgaattataatttttctgatgactcttcattagtgtttaattataggtagtgggagcaaagctccaaaatgcttaagcgggaggccatctgaacattttgtacctccatacctaggagattctgttccagttgattaaaaaaatgaagaccattagttggaaactgaaggattgcaaaatatcaaaaagagtctggttcaatgaagtctcagtccctgacaatacagacattcatggaaacagctctagccactgaagagcttttcatgataaaggggtgcagatagaggccagaataaagtagtgctggcctgaggctttggtgggacttaggctggcccctgaagaatgtttccattttctcagtggagatgagtggggtgaaagccaagtagtgaaaatagtgtccaacaaggacaaggagaatccagtgtttacaaaaccctgttgaaggctcttgttacaccataatatagcaggggagcaaggtgtacaccaaagacaccaagaagctgaaagcagaaatctctttggaggagagataatgacttcagtttctcatgtattgaatttgtgtgtacgttgaagtcatgttgccttggagagtagaataagatcccagatagaaacgagatgagtgtagaggagaagccatctggaattcgatttgagcaatgtcagtcgtgagagcatggggccagggcctcccgtaagtgattttaaatgtgatagagatgggcaaggtaagggaagatgcggtttctttgggctttatgtagtcagtgcctcagaaaccccatgaagatgaatgagctcccatgaggaatcccaaagaaggccttcctgcctagaaggccaaagaaagatgctgttagtagacacatataaataaacaaaggcagaaaagagataagcatttgaagggtggccatgcttcaaagggactaaatgtgtcagaggaacccgtaatgggcagtgtccaaactggtgggttgtcatgtgttgtaaatcttaagacacaacttgatgaagattagaagaggctgtttggtccggcagtgaaaaggccactagtaaattttgaaagttaagaagagtaggagcaagagggaggagataaagacaggctaggaggaaagaggagaaaacagtatggatctcttgtttaagaaaagggaaagttgacgagaagtaggcaataattacccccttggtaactgggctaatttcagcaaggctggggacttaacagctgcaagcaaacaaacatttctttcctgcggcgacaaatgtacacttcagtttggagccttttcttctcacttcattgcgttctcttgaattttgcttgacattattgatttctttagaaagagatactttggagggcctgtttcttcaccacaacttagcaatttcatttgcttgaatccaatctaaatgaaacatgaaattatcttattaccactaattagtggtggagtagttcatactgaagagttgagctattcctggttttgtgacctacctggctgatgaactgtggccatcagagtgcctgttgattgtcaatggtggctgcaaggtagtggggaattgactcgtgtaaagtgagcaggaagagaggtcaggagagattatgatggttaaagctgattgtcaacttgactggaatgagaaacatcgaggtcatttgtaaagtttgccttttggtatttctgggagacattagccaggtccaggaatgatcatacagattctcacttaatggtttaagccattgatagatccaccatagaatagataactcggagctgatgagactaaggaaggtaggtcctaattgaaagttgtaaatccctagagatatgttcttagaggcctatatcttgtcactgatacctaataccaccttctggcttctatgaggtgatcaggtctgccccacaatgttcctgtaccataatgatctgcctgatcagagaggcccagagtcagctaccatgaataataaccatgaaatctggagccaaaggaaaccttttcccttctttaaacagtctgtaaaagacaaaacatgtgaaaggcatagaggtcacaggggaaagggtgacattttttatgagagtcttacagggcatcagatggactttggcttttattttgggtgaaataatgctcaaccatacaaaatctgctttcttagcatcaactgccttccctatatctctgagttttgtgaagatcctttttttcaacatactttcattattttaagttattaataaattatccacagtcttcttgaaattggcattttatgattgaaaaatagaagttgacaccttcaaatgacactttttatagtaaaaacaaaatcgtttcagtggaaacctactcattctgctgctgctgttggaatatctggtaagaacaaattttgcaaggtgtttttgttctccattcttcacagtgaaatttgaaatggtttagcatagatacttttacaaacatatattcatggcttagttcacagcatctgctctttgacaaatagctcgataaaacaaaacttttaaaaatagtatgtttttgtttgttctctctctctgtgtgtgtgtgtgtgtgtgtgtgagagagagagagagagagagagagagagagagagagagagagagagagagagaaagatgcatgtgggcacacacttcttatgtaagtattagggactggaagtctggaagtctggaagtcatgatctgatgtttgtacagcaagcattcttatacttatacatctccccaaaccaaaactttcctgaaagagttatctcagccaggccttacctaaaagaccagctacttaggaggctaagataagaggaccacaagtttaaggcatccttggctgtagagtaagttcaaagacagcctgggaaacttagtaggactctatctcaagaataaaaggtatagaaaatgtggacatagcacaaaggtacagtccttgcccaacacatgggaagcccaatccacaatacaaataaataaatgtcattttattatgcttcttttggatgtgttgataggtattttggattacctttggaggcattctagatgtggtgataccatgccctctccttagcaagtctaccactaaacaggacattcaccaatctccaactatctagaattgtgttgatattctttaaggagttgtgatcacttgaattattggattaaagagtgaattcattctctagtcccttagaaaccaggttttcaggctgatatcatgtagctcaaagtccaagctccagttacatggttggtctttctgccatggctggctttcattcggaaactctcttgtaacccaacatcagtcacctcactggcatgaactcggatgtggttgaagggcccatggtaagtaatcttgatattcatgttcctcatgcaggtccaggttttaaaatctccctcccaggaactggggtcaaaggccagacaatttctttctacaacaaatataagcctttagaaaatgaaattcaaagggcatccccttcaattgggaaatctacataaaagcagaaactctgtgattaaagcctgtggctattgtgtgacatcattaaatgagttaaaaaataaatagaaagaaatgcttaacactaaagcactgactgttagaaagcacgggctacccataatcctaaatataagttacaaaaatttcacagaaaacttactgtgtaaacaattaaaactagcagcacattctactgaccgtgcattctactctcttagaacgaatggggaatcactaagggactagaacagccaagacaacaaaaggacagaagtaaaaataaatcattcctgtgactttggctctcaaatagtttatgatctaaaaattgtcccctttctgataatccaagtgtatttcatgtcagatgaatccataacctaaagctgttatacaccaacgtagaaagcagcattcattcccaaacttacatgatgatgggttaaaagaaattaaatcatgaaagaagcatgcaagagtcctgtctgccagatgtgcaagtgtctctcaacatagtaaacatgttctgaacactgaatcctgtcatcaggcagaatccaaccaagtcaaatgccttgctcaacatccttagccagccaggagttgttggcacatgcctttaatccacagctccagagaagctagaaccctcttctagaaacagatggaagcagatacagaaatccacaactaaccaatggcccaagctcctggagtgagaatatgaacaaaggagtcaaaactatgatgaggaaactcacagaatcagctgacccaagctattgagaaaccaggacaggctccaaagcaatacaaagaaaccctgcctcgaaacaccaaagaagcaagcaaacaaacaaaaacatctttagctggagctttctgtcccagctggtcctgctgcccttcagcactaaataaacacgcagatgctgtattaattataaatctgttagtcagtgacttgggcttcttattggctggctctgtcttaattattaacctatttctatcaatctatgtattgtcatgaggctgtggcttacccagtaatgccctggcatgttgttactcctttggcagcatctctggcaagggcctgcctaacctttcccagaattctcctcatcccctagccccacctatgttcctgattcattttagaaacaaaggaaaaaagtcaagcatggcttcttggcagcaacattttcttgggtttgctctgtttgctagagacaagcagcacctcatggctcctttaagggaggtttcctgactcagcataagctgcaaaagcagcgaattttttagcaatgttgtttatcagataaaagactcataaagatagatccagaggtgtaacaataagtctttgcatcaacctgcccgagccccgccaccacatgggcacctcaaataacacaagagacttatattaattaaaatgctgctggccagtgactaggatttctcaagtgctagccctgtcttaagtatcaaccataatcattaatctatatattttataaagacttatcttatcaggctccagcagcagacatcttctcttgctgggatcacatagtggctccacagataagaaagaaggagcaagaggaagaaagtatttcctttttccctgcttatattctgagcctgccggctatgtctctttctgcctggatcacaagacttctctttactacattccccagaatcctcctcgactcctagtcctacctaacttgcttccctattggccaacggtactttatttatcaaccaataagacaaacagatacagaaggacctcccccatcatctcctcttttctgtctaaataaaaagaagggttttaacattaacatagtaaaatatataacaaacagttatcaagtaagaactatagctacaatatttagttcattaacatttagcaagattgaaagaaaatatttatcatctatcccatctttgtgagtctaaagtcttatatatagcttatcttttataataactaaagaaaactataaccataactatgtgtcttcaactccatcagagaccacagaaggataatttataaactctagaactgacagagacttctcgctgcctggacagtcacccaaagttcctctgtaatgttggggcatccattttcagcctataggccacagtgtgtctggcagacttctccatgaagcaggaacccttcaggactgtcttgttttgcaagttcagcagtcactttcctgtgggtcttaaatgtccagtttgtcaaacaatccagacaagagtggtttcttgcccaaatgttgaaggcaaactccatattgagttccttcaatgcccatcctcctttctgacataattggtgtgccaggggcagttgtgtctcactgtcatgaaaaaccctaaaccatttaaatttcatatattctgtaggtctttgaaaggtttgaagaatatctatccatctcaatacatctctatatatctagaaaacctaactgacctaattataagttctgattattataggtgactatataatctgtatttaattatgcattacattttaaaagagttgtataaacacaatacctaaacaagaggagaaacatatatatatatatatatatatatatatatatatatatatcacaaaattgaccttaaagttgtatcaataaatgaaaatctataccaatgcaaagtattcatttctatatcctattccccttttttcctttaaaaagagattgactgtgatcattaccatctataaccaacaccatttaaatgaaaacaaacatttgtaaacaatatttggaaatttgggcatcattcattccaaaatgttttctgctggttgggggtgatgtccataccatgggagtcatgataaaacacagaaacctggcagtagtcatctatgtctgcatcatctcagctgttttgggtgtaggatcagttgggtcactgcttcagggggtcttgcttgatcaaaccatattagtctagaaggaatccatagctttccattttctgtggaaacacaagcaaaaactcttttcccaagtaacctgtccttatatttaaatttagaagtcaaagaatttttaaaatatataaattggattaatttggcagcattgatgatcaaattattgtagcagctgtagctctttcctcggcaatcaaacaatttacagacaagaatataccatatagtatctagagtctctgtgtattttccatctttacgtggctttttattcttttacttccctttttctgagacagggttcacagtggaaatctgcctggctctgcttccttcagcaaatcctaccagtgtgtgccaccaccaccggcttctctttctttcttttaattactttatcctgtcccgcgctatgttctcggccggcaagaatcacacaggacactcggatccttctgcaggaaagctttaatgcatcttgagagtgggagagcataagcttaccagagcggagacactgagccaagaatcccgttccttaataaaggctggcagcagtcgcctgggacgtgttaccctatgaatggcttcagctcctcaggccaaatgagccacgggataggcagagatcaaaggaatggaaattacccagcgcctgcgaaataatttacatttggtgcctgcaggcaccatcattgtaatggagaatgcaaggacggctccctacagatccccctttttttattaattaatgataaggctttatatttttacaagcaaataggtcacccatatgttgagggatagaggcagaggttgtaccttcccaaatcatacaataagactgtgtacgagagtcgagactaggctgttagcttgatccgaagcgctctcgacctgtcctctgccatttttctgggaaagggagattaggcaggcaacccttatgcaggacaacatgcctcccagagaagcctgcatactaggcaactctgtgcgatgtctttgctcaacatccctcatgggctgctcaaaccagacactctaccctgtgcaatgagcctaggctccgggtgtgcaagagctgtctggccggcggcctattgcttaagcatagttagccaaatatcagtggaagccccttgttttaaaattacaggcgcttgggcgataaccatcttgtctctctttagtttgagccttgagcttacagaccagccagagaagtaacaccaatccgcagcaaacggctgcaccaaacaatcccacccccaccccttaagtgatgacaatctcaaggacaggagttaatctggataacaatagtggctctcaactcccggggagagggtggagtttcaacttttgaaggtccgaaggggctcttcgggtgagtctttctgggatccacaggggattctcttcatcctgtggaaaaacacaatagctcccctggatcttatgagaataggatccgggcctctccaaagaccagttaagatatctttccattttaccatttcctttggccttttaggttttgagatgtgacgcttggccgtagtatggccctgagtgtcaatgtttatgaggctttaaagccacaggcattccaggcctccaagaagtgttgaataatatgcatggccttttcccctatcaaagactgggaaagccatctgtaatttcctccgctcctctaatggtaagaaggagtcggtaccaaataatgggggtgttgatggaagtacacccgctggattaacaggtctcttaaatttaccggggtgtgaccggttatcccctattttctctccctccttttttgtttctttttcacctagctgagctgtttcctctaaaactttatctcttgagctttcagagtcatcagagctatcaagatttaaagctttaaacttatttacagaatcatctaacaaattattcactcccttgtcattagacatcccaggaggtccttttttcttatttgttgctgtttctcttaacaaattactcactcccttgtcactagacatcccgggaggtcctttttccttatattttattgttgggcgcgccccatctctcactacattcggtttctgacatgtaattctggacttctttaagattgctacaacagtgagaaaggtcaaaatggctcctagtaaaagcacagaagcctctacattaacctcccaaaatagcaacattcccaagccaaagtccagaaaagacatacctctccgaatttaccaccctgcagttctgaatccgccccgttagaggggtctccgcggtgccggtgatgttaacaagttaagcttcccgggtttcagcaccagatgtcccgcgctatgttctcggccggcaagaatcacacaggacactcggatccttctgcaggaaagctttaatgcatcttgagagtgggagagcataagcttaccagagcggagacactgagccaagaatcccgttccttaataaaggctggcagcagtcgcctgggacgtgttaccctatgaatggcttcagctcctcaggccaaatgagccacgggataggcagagatcaaaggaatggaaattacccagcgcctgcgaaataatttacatttggtgcctgcaggcaccatcattgtaatggagaatgcaaggacggctccctacattatcctgtttcttttctctcacaagcctacacatatttttaaacacaatgtaaacctttagcaatttggaatgaatgatgcccaaattcccaaattgtttataaatgttttcatttaaatgttataaatggttaatgatcacagtcaatctctttttaaaggaaaaaaatggggaatatgatatagaaatgaatactttgcattggtatggattttgatttattgacacaaattcaaggtcaatttggtatatgtatatttcttctcttatttaggtattgtgtttatattgcttatttcaaaatgtaatatataattaaatataaattatatatagtcacctattatagtcaaacttatagttatcttagttaggttttcttgatatatagagatatatattcaattggataggaattcttcaaacctttcaaagacctactgaatatgacacttaaaatgatttagggtttttcatggcaaagagacacaactgctcctggcaaaattaattacttccgagaggaagatgggcatcgaatttgctatggaatttacctgcaacatggcagaactagccatttgggcaaaaaattgctcttgcctggactgtttgactatatactgataaactggacttgaaggacccccaggaaagtgactgccgaacttgcaaaataagatgggtttctgcttcatggaaaagtctgccagacattctgcaggacacagaaaaatgaatgacaaactgtcaatacaggcagacagtttaaaacttcctgcttcactgagaagtctgttagaaacactatggaccatgggctgaagatagatgctccaacgttacagaagtatcttgggtgactgtccaggtagtctgctgtttctgtctttgcttgcacctttaggaagtcacatgcttgcacttcctgactatgctagtactgttattttccttctcaggtccttgatgaggttgaagactagacagtcatagacattagagaagatttagactttccagattatgactgctatctgagtaatctctgtcatgcatttaccctcatactggacatgtatactggacatgtagtatatatctattgctcagtgttcctctcaatggttgtaggttttaatttgtgtacatttacctttccttttcctggaatgtacttgacatttgtttttcattttatatagtttttgcatctggctttaatcttcttctttagactaaaaggagaattgtatcggtcttgctggtgaatttgtaatggtggccccacccctttgggcatggtttcaggtggacagaagcagaaagagggaagcttgaggcatggcttctttttgagaatgcctcttgggtcagctgataggatagaaagggcagagaagcactctcatggttctttatatctgtgtaagtgttccccaataaacacccatttctcatttatcttgagtgtagtgaaatctttacacccatgccttcatttagcaatcagggaaatgcaaatcaaaatgactctgagataacatctttttttttaaattttattttattttattagttctagttagggaacaagcttatttcaagtcccttctccctctccctcccctcacccccaaactttctcccccacccccagcccacccccccaaccccatccacccactactccccaggcagggtagggccctcaacgggagctcagcaaagtccaccaagtcttcctatgctgatcctgggcccttccccatgtgtccagggccagagtgtaacccttcatatgggatgggctctcaaagtcccttcttgcaccagggaaaaatactaatccactaccagaggctccctggagtgcagaggcctccttattgacatccatgttctggggtctggatcagtcttgtacaggcctcctggacagcatctggggtctcccttgttcaggccaacagttcctgtgggtttctccatcctagtacagaccccttcgttcttcattcctccctgagataacatcttacacctgtcagaatggctaagatcaaaaacactgatgacagcttatgttagagaggatgtgaagtaaggagaacactcctccactgctggtgggagtacaaacttgtgcagccactttggaaatcagtatggtggtttcttaaaaaacagggaaaaaaataaaagtaagtgtattctaattaggaaaactattttgtgattttccacaaagaaagcttggtgaaatattatgtctgtagcaaggattgatgaccaacttgtgccttgttcagaccttgattaaaatgtccactcactgatttatacaaccattgctccaacagcaattaagagatgatggctaaagttgaaggtagggtggtaatggtgatattgtgattttcagcctggaaagtttgagcttgacttttttaatattcttttttattttacatactaatcctagttccccctccctcccctacccctgctgcccccacatccccccaatcccacccccagctgctcctagaaaagggtaaggcctcccatagggagtcaatgaagtctgccccaccaccatgttgaggcaggaccaaagccctctcccctgtgtctaggctgagcaaggtatctctccataggaaatgggctccaaaaagccagttcatgttctagggatagatcctggactcactgccagtggcctcatacagtgaccaagtcacccactgtcacctgcattcagggggtctagttcattcctaataaggttccacagctgtcagaccagagtttgtaaactctaactagcttgggccagttgtttctgtgggtttcactaccagggtcttaaccactttgctcatattatcactcctccctctcttcgactggactccaggaacttggcccagtggagaggtgtggatctatccatgccttactggatgaaggtttgacaattgtggtagttctcaatctgataacatgggaaggccagttcagtcaccctctcctctattacttagagtagtcaccctcttctttattgcttagagttttatctgggtcatccttgtgtattcttggaaatttccctagagccaggtttctcgccaatcccataatggctccctctctctaaatatttctttctttgctctcccactctgtccttcccccaacttgaccatcctgttccctcatgttctcctccccacttcccttccctcctaccttcttcccttccaccctccactctccctcccatgctcccaatttactcaggagatctaagcagatccacatatttttctcttacggccctcctttttacctaacttctctgagattgtgaactgtagtcttgttatccttttctttatgcctaatagccacttatgagtgagtagataccatagtgagggtcttggttacctcacctaaaagcaacccaacaccaggaagactcctattgaccaaaatttacccaacacaggcatgtgttgccaagcctcgagacctgagtttagtccccaaaagctaacatggttaaaggagaaaacagactccctcaagttgttctccgacacacacatatgcacacacataaataagtaaacaaataaataaataaatcactgtgttccaaactgaaagagatggcagagctatttgatagtatttataacaagaaagttggccaagcaaagcaatgcaatcattagaagagtagtttgtgcttccccctagacacagatgaggatcagcaaatgacagggtcagagatgagtgctaagaagcagattttggcagctgtgcaagtcgatagaggagaatccatatgtccctgtttaacttggatagcctttggggatgcctgctttctaaaatttctttatgtttaatggcacctctgtttcatgcccaaacatatcccccagtctaactgacaaattacatgtcagcctaattggaaaagacagtaatcggacttggggaataagctgttaagaagctgttgattaatccactaaagagatgagatctcagacctaagctacaaaagatgaattgaggcaatgcaaaatctaggtggtcaaaccactgaaatttttctatccaagggctatcctctgatggaggtcagaaccctgtctgtgggataagctcacataccatgtctgattgatgcagggattcagatgcctggagttttctttgggatcaactatggtatttgctatgactgtgttgcaattcatgctggctattttaatgtcagcttgacagtaactgtagtcattttagaggggggaacctcaattgagaaaatgtctccataagagctggctgtaagtggcaagactgggacaacttctttattagtgattgatgagggagggtccagcctattgtgtgtaggaatacccttgggctggtggccataggttctataagaaaacaggctgaacaagccataaggaacaagccaggaagcatcatttctccatgccctctgcatcagctcctgcctccagcttcctgtctggtttgagttcttaccttggctccctcctccatgagtcttcccaccccccaccccatggactgtgatttgggatatgtaagacaaataaaacttttcctctccaaatggtttttggtcatggtgtttcatcacagcaatagcaaccttaactagacactacccaaattctcccttcagtccatcttgcttcttcctctagatgctgattccaagtgcaatccctaattcacttcctccacacacatctcaatgttggaatctgcttccatgggtatttgacccaacaacaaccacctcacactttctacagaacaaagctgtgacatcatttcatctcttttcattatgaaaatgaactgctaaaggtgactgtttagaaatgtgcctgatgacaggaaatgttcagcaggagttacagtgatcataatgactatcactgtatctgacagaaatgactgtatcactatacttcgagatttgtgtctgacagccagctagatgaaccagagccagctaaacaatgcaaaaggagagatagccacaatcatcttttcctttgattgtgagaaaagttttccattaaaatgattccaaggaatgatgtttataaatttgtaactcctagaaagcatacttgcaatctaaaattactccaggtcttggaaatttaaattgaattacccagcattcaatccaccattcccacttaccctactaaggaagaattgggtgtgttgcctctgatctcttcttttgaatcactgatggagacataccctacaccaacctgacaggcatattaaaatcaaacacaatcatgacttgggcagataaggaatgaactgcaccaaagcctcattcaacacagtgagaatactgatgagagtatcatttgaagaatttgagttgtttggatcttgatggctttgtgtgttggaataagacacaaattatgatacacaggattgggataaagtaggtcaattttattggggagaaatcgagtatatgggaaaccaataacccaggatccacactccgatctgcactctgagccgccaagctcagctgccctcccagagcaggaaccctgagagagagcctgccttccccttagacctaaatcccacccactcaggtacacacctgtgatcacacccaaatgggcgtggtcagcaccactggtatctagaagatctctcactacaccagtgtggctataaaacttcctccattgaaacacaacctttagttgttttttgttttttcccaaagacaaacccgtttacacccgtatcaaattgtatacatattcacctgaaatattacaaaatcttgactttaattgataaaggatagcaaattgaaacaaaaactcacttccctaaaaatttaagtaattgtgggtcactctgtgatgcaatactgcattattatattgaaaaatgtttcctgagactagagagttggttcagccctttagagtacttaatgctcttgcagaggacctgggttcaattcccagtacccacatggtgtaccacaaccctctgtaaaatccagaagatccagtgtcttctgacttctgcaggcacaaaacttacatctaggcaaaacacatatgcaaataaaataatcaaattaatttttaaaaaagaaaattgtttcctgacttctatcacattttcaaattttagatattgtcaataggcacacccttggcttagaaccctacataaaccacattggttcccagagatgaagaattcagttatccagggctagatttaatccaagtcacatcattcttgggatcctaaatttttaaaggcccctctttcctcttcaaaataaaacatatctatttcctctgtatatagaatcagtccacccaaggaacactgtgtgggattgcctttaacacttcatctcataagcctgggaccagtgtgttatgataaatctttctgtcaaaagccgcccgagccccacagccacgtgtgcgctttacgccagccgcctgagttctgcccgccatgtggatggacaaaataatagagacttatattaggtacaaatgctgcttggccaatgactagaatttctcatctgctatctcagtcgtaattatcataaatctatatattttataagacttatcttatcagacgccttccattggtgtcctcccttgctggtggatcacaccgagaatctggaggaagagcagaggggacaaaggaccacttcctgattgtccttgtttaaatatgagtctccttgccatgttacttcctgcctggatcaccacttctctactacatttcccagaatcctctttgactcctagtcccgtctaacttgctgcatcattgaccaaacagtactttattcaacaatcaataagataaacatacacagaagtacattctccatcaccatctaggaacaaactcagagaggcaagtaactgtccacctggagccttattccctgctctgtgcatggggaatcatccctgaaatccacattaacatcatcttctactctatgtgggttgtggatgtggctcctattagtaattccaaaatgatttctctggtgtgtccctctacagagaaagggaagaaagaagctagtctctcaggcatatggcactaaatgttcaataaagaaatgatcaggccaggcatagcggtgtacaattttaatccaaacactcagaggcagaggcaggtggatccctgagagtttaagttccaccctgaaatttcatgtatcgccttctcgggggcttcaagaagattggatcctgctacatattgcctggcctccaaagtttgccttaaacatatcaacataaaactctaagactctgcaactcttaagttccacatttttccaaagctctcattatgtagatgatacaagatctgccatcagcttgaacaataatcagcctcctccaaccacatttgcaggagcctctgagagcatcaatggctgaacatgagaaaacactttaatggacctggtggatggggtgacctgatgaccctctttaaccaaagaaaagcattgcaactgaacttgcaattgtatatcctgaagcctggaatgggcagagtctgtccaactactaacatcatctcaaggcatgtttccaacccctgccagggctaagtgcttagcttatttttaatgacactactcttaataaatacatactccttgctaacagttttcagttcattcctttttttttggccagactgaacattttttccaaaatcattcttttgttctttcgatgcctaatcctcattataaatctggctataagcaactaacagtaactgccatactgtttgaagtatgtgctctcttgaatttcactatcaaattaattagtgcatttcttggaattcaagtctcactcaatctttcaagctatgtacagaaatgtagagaaattctttgtcagaaagtagcatgggtaacttctagtcctcattcctatctgaaatctcataggtgtagtttttattgctcatgtttctattggcattctggtcttgtgggattcctcattaagttctgcttacagcattctggggcttctctaggatgcatctccaaagtcttccagattcctcccacaaactagttttaaatgcctaagaagcacatgattagacttggtaacagcaatgaccctctccccttccctagaaatgattttctgtattagttacttttcctactgcagtgaccagaactacagaaatgaacaaaggatgaatggataaaggaagggatgattttagctctcagtaacagatcagttctctctctctctctctctctctctctctctctctctctctctctctctcacacacacacacacacacacacacacacacacacacacacactttgcacctaaacagatcatatttcacatttagcctagttatgcctaggacttggtgtcacctgggcctactgttgcatgcatatctgcactgatgcatttctcctaacctttctacaattcttatatacttaaagatgttaaattttagacatcctcccatttagactcataaattgaacatggcaattccaattcagtgagcttgatcctattaatagtttaatttggctcctcaaagtttataatttcctttaggaatggaaattatgaggacaattatggctttatcatcacacataaattcatgaatctagaaatcccaattatttgtccccagtattctagagaggaatatatattttttaagtgaaaatgtcagccaggcatggtggcacacacctttaattcaatcacttgagaggcagaggcagccagggtccagcctggtctacttaacaagttccaggtcagtgaagattacatagcaaaaacctgtctcaaaagataacaaaataaatcaattaattaatttaaaagttacaatttaaggtcttttccttcccagtaatagcaatatagctttgtttcttgtgtagaaaaccaaaagggatgatttttttctatttggcttctatatgatttctacctcaattgcatcaacataattttctttggataacaatatccctcatttatcacagacataaaattagtcacatccaccacaggacctaccaagtaagttttcactcatctggatctggaaaactaggtcaaaggattgctgtccctttaaaatcagacactgctaaaagacaaccatgttgcaaagagaacaataggtcttaggtcagttttgtgggtctagtaccttagctctttcctataatgcaattaccatactaactcaaccattgcatgatgcaggacctgcttttcattataatgagagcatttaaaaatagtatagaactttggagaacctgaaatcttttcaggaaagcacttacaggaagtaattgtgccttcattaccccctctactttccttactgctgttcacggctgcaagctaattattctggcaaggaggctcagcaagaaacagtgagaacatctaaaaacacaacagaagaacttgtaatcagcagatttctttccctaaccaacatccctagattaagagtgacacattatgaggtatccacaacacaggtcttttccagaatcttccttgtgatcaaccagtaaagtggataggtctcttcatcctactcagtttaggagattttaatgaggacataacaaatggttgactgccaaaacattatcaggcaacttagtaacctgatgctggttaatactgaaagggcttaagtaaaaactgcacatttatcagctgatggcataactcaaaaagaaatgaggtgttttggtaactagcttctttagttcattgtatattttagaaatcagcccactgtcctctgtcagatgtgagggttggtgaatatctttttccattctatgggctgccatttagtcttattgactgtgtcttttgccttacagaagcttctcagtttcaggaggtcccatttattaattgtcgatctcagtgtctgtgctatggtgttatgttcaggaagcagtctcctaccaattagttcaagggtacgtcccactttctcttctaagaggttcagtgtggctgaattgatgttgaggtctttgatccatttggaattaagttttgtgcatgacgatagatatggatctatctacaatcttctacatgtcaacatccagttatgcaagtgtcatttgttgaagatgctttcttttttccattgtataactttagcttctttgtcaaaaatcaggtgttcctaggtgtatgggttaatatcagggttctcaattcaattccatttgtctacctgtctatttttgttccaaaaccaagccattttcaggactatagctctataatagagcttgaagtcagggatggtgatacctccagaagttcctttattgtacagggttgttttggctatcctgggtcttttgtttttccatataaagttgagtattgttctttcaaggtcttgaagaattgtgttgggattttgatgggaatggcattgaatctgtagattgctttttggcaagattgccatttttactatgttgatcctacatatcctagagcattggagactttccattttctggtatcttctttaatttctttttttaaggactcaaagtccttgctatacaagtctttcacttgtttggttagcgttaccccaagatattttatgttgtttgtggctattgtaaagggtgatctttctctgatttctttctcagcccatttattgtctatatacagtagggctactgattttgtttgagttaatcttgtatcctgccactttgctgaaggtgtttttcagctggaggagttcagaagctagccactaaaacaccaagccatccaatcaaaaagtggggtacaaactaaatagagaattctcaatagaggaatctaaaatggcttaaagacacttaagaaagtgctcaacatcctcagccaccagggaaatgcaaacccaaacaactctaagatgccatcttataccagccagaatggctaaaataaaaaacgccaatgacagtttttgctggagaggatgtgaagaaagaggaacactcctccattgctgatgaaagtgcaaacttgtatgaccactttggaaatcagcatggcaatttctcaggaaagtgggaatcagtctacctcaagatccagcaattccactcttgagcatatacccaaagaatgtgcattcatacaacaaggacataagttcaacaatgttcatagcagcattgtttgtaatatccagaacctggaagcaacctagatgcccctcaaccaaagaatggatagaaaaaacgtggaacatttacacaatgcagtattactcaatggggggaaaaacaatgaaatcttgaaattcgcaggtaaatggatggaactgtaagaaaacatcctgatgaggtaaaccaatcacagaaagacaagtagggtatatactcactcatatatggatattagacatagagcgaaggactaccagcctacaatccacaccaccagataaactaggaaacaaggagaaccccaagagaagaacactggtcccccgaagaaggggagacaagaacccctgagaaaattgggagcatggggggagggagatgggaggggaagaaggggagaggaaggagaacaggagggataattaggactgagacatgggagaaatagaggagggcaataaagaggactggcactggggaaatgttcaggtatccacagggatgaccccaactaagaatctaggcagtgatgtagagtctgcctttgatgcccttcctctataatgagattgatgactatcttggttgccattcctagagctttgatccagtagctaatcaaagcagaagcaggcacccacagctaaactcctagaatctagttgtggagagggaggagggattagcaaaggagccaagactgtgatggagaaacatgcagaaacagttaacccgtcctaatgagagcatggaaaccctagtggtaaagctggggaaccagaattgaaccaaaccaagccctctgagtgtgggtgccagttaggaggcctgggcagtctattggacctctgacagtggaaccagtgtttatccctagtacacaaaaggactttgggagcctatgggagggatactattgcagcccagatacatgaaagagggcctaggccctcccccaaatgatgtaaaggactttaatggtcccacgtggagggcctcactatccttggggagtggtggggataggtttggtgagttggtggaggcatggggggataggagagtaagggggtgggggattgaaatgtaaaataagattgttctaaaataaaatttaaaaaggaaaaaagaaataaggatcatgcactagtttgtttattcattactaaaatgaaatacatgaggtaggatcactttataaagaaaagaaccttgtgtagctcaccattttggaaattcatgagcaaggcaccagcatagtttggctctgaggcagatcttgcaaacgatgacatcatgatggtggagaggaagaggaggatttattaaacaggaagctaaaaagctggatagggttgggcttattccttctcagccagctctctctggagtgccaaaggattccatggaaccacactaattttttgagatgatggtaccttctgtcacccaaggatttctcactaagcctcatctcttaaaaactctacattatcttccaatcaataagcgagctctttggagatgctcatactgcattaagaccaccccggtcaatggaaacattattctgtttcatttgctgcacattttaagtctttaacttttgttagtatgcctatgcttaaatttggcagcttaactgcattcttatatgaaattcttattcataaatgctacttggttagagtcttggggattgcaaatgtttccctggggaaataactcattcctaggatgaggcaaaaaaaaaaaaaagaaaaaaaaaagatgattcagaacttgtttgtttgtcccaagaagtaaaaaaaaaaaaaaagtaggtattatgatgggaacctttgatgaagggactcccacttttcaaattggagaaaatggagcatgaaatgactaatgaaacaaatttaagcactttgaatattataataatctaccactctatgctaataaaatccccttttagtgaatggcagctaattagtgtgggcaaagtggcagaaatggagaatgactctttggaagccatcaagaaatcctaggatattgatataattgtggaatatttccccaaaaagttctagttaaattcaaaaggaaaactgttgaaatatctgggaaaatacaagcatggctgacagataaaagtttgaatcatcagtagtgggacagggtggggcaagataatattccccgatacgctttcctgagaagagtgctgtttctcccaaggggctcaaacaaataaggcagacttgcccttggggctgatcttaggcatgtggacagtgtgtacccaggaaactaggcagccctgaagctcagaaaaaagtttccacatgcttatcaatacatgaaacacagccccaaatctaaaacacaaaaacaacagaaaaagaaaacatccactgtgtaagcataatgttagtgactctctaagtttcatatgaatgagaatcaccagggaaattatttttaaattatcaattgctgggtctctgagaggctcatagctttggaatgagacctcaggatctctgtttttgataggaactccaagtgattctgattacaattatcctaagacctgtgacctcagagaaagggtcccagaaaaaaacaaaacaaaacaaaacaaaagtcatatacatgttaaagattctaccaggctgactgattgatacttcctgattgtagaaatttggggtccagagacaaattgtcttgaggtatcttttgtctccttagccggcattcattgcccacttctctgtttcacctaatgtccttttgactagtaataaaacctttggaatgtattaacagaatactatcaacccaaaagctaaggaagctgttaggtaatgtctaggactatagcatcttgttataaactacctacctaacttacattcccaacacatttgcaaaatatcttgacttatgagtagctttaatcctatgactataaattgggtgatatagtatttatgatttattaaagcttgcctgaggattcagaaagcaaagccagtcccacgccatagagatcaggtggtggtggtacacacctttaatcccaggactcaggaaaaaggcagatggatctctgagtccaaggtcaccttaggctactggagagtgaatcagaactcatacctttaatcccaggatttgagaggtataataggtagaggcattcagtctgagattagtctgtagtcatgttgaggaaagcatagcagtctgagtgaatctgacgagcagtggagttgttagcagttggaggatctcccctttggtctgagctgagatagaggtaagagctagctttggtctgagctgagatagaggtaagagctagtggctggctgctttgcttttctgatcttcatcttgaagtttgaagccccatatctgtctctgagtctttttatttatcatgccacaataaatattaatgtaaccatttctacatcggaacatgttattcagggcaatatgaatcaatgctcctgagccatgctcacttttatttggatcagtaaattacttcttattccttttgaggggagttctgtgtgttttccattggcgaaccacatttcaagaaccactacttccacaaatcaatctccttaagaatgatcagtaactctcattttattaaccaatttgttctcctcaggggaggtaagcattaccacctgttttgagctgggatccatatttaggtacatctgatttgaaaaccactgtcaacaattgcattgccttattatttcattaaatatgggggtaggcagggatatctgagagaggaagagaggagatgagttgcaggaaagagaatggctcttcagcttttggctaaggtcaagtgcagggaatagaaaggaaacaaggagcaccagaaacagatttggctgaccttaaagtcttcctacagttagctttctgtacctcaaactgtaaaaaataaaaataaacaggagctacatgcaagggagattttataatggttttgttgcacataaatgcaacttggaggcaaccttgtgtggttataattagttcctttggagaggtcaagtaattaaaccccctggagagggtctgctggattccaaaatgaaacaaggcatagtatagcagttggctttgtggcaaaagattcctttgctgctgtatttttttccaagggtatagagagactatgagactgtcacattatgtcacaagcagaaattcaatcatgatttgtccttgtctagtccaagcctcttctgaaggattgtcacaagttattgagtcttgaaagcttattcatccattgctaagtgggaaagcacagttctttcctattaataggcttcatttgtactaaaacagctgctagcattggtgagcagttacatgcccggtgctctactcattattttataggtaatatataatttattccaaacaacgcacagtgagacttctgttttatgggggggagggagtaaaccaaggctgaggggagttattcattagtgtctatcgggtcatctggatctcaggccagcttcataaccatcagccacaagggggcagaagagattctacccatacagcaagccctgtctccgctaaggttgtaggagagaaaagcccgattaggaataggctaagcaaaaataaaaaagaatttatcgacaaagtgttgattgctatatttggatgcttacccccccaaaaaaagacccatatgttaaatcgtggtctctaggtggcattgaaggacattggagtcattaagaagggaggccactgatggaggcctatagctctttgggagttgaagggattatgaggccccctttgtcttctttgctttctggatatgagctgagtcctcttgctgcattaagcaataacattaccatacctgtcttaccacaggccccaagcaacatgaacctccaaaaccccattataagttgatttttagaaaaaaaaatttctcataataatggaaaactgaccatcatagtgatatttttgtcacaaaactatagcagagacagataataactgaacttcagggaatttcaggcactatgagtgtaaataccatataaagtaatgagcagaacacctggaaataccaaacattcctaactgtttcttcccgctccctatgtctctctccctccttcctttcctctcttttttctctcccaccgtcttacctctccctccttcactctctctccctgtattcctagttttcctctctttccctctgtcccattttggcttttgagccgtctattttcacatcttcctactgaagacagaaaaaggccaccatcgatgcccaggatttatattctgtagcagccaacaaaaaaagagactccttcacagtctttcttgtccgaactcaaaattccctaagataacattagattggttcatcttaggccagcatccagctctgagtttgctagttatagccagtatacatatgcagccaccagttactgatgctttcatatttgctttctggagaggaagggaaaaccactcttagctggacagtcagctcttgccatttcactacacaggatgttataattaattatttaaccctaagaatttttaatttaattgcaaaaagttttcaatcatactgggatctcactaatattattattaaacaaaactaatgaaaatgataatgcatactaataccagaaaaaaatatcctgagcctttagctctatccagcttgagggataaaggttcttttctatgcagtgaagacatatatttatacttgggctgcctagatgttttaccaacacgttacttcaaaatgaaagttgtttgtttgtttttttatttgtttggttgtttttttttttggtgttttgagacagagtttctctttttatggagcctatcctggcactcactctggagaccaagctggcctggaactcacagagatctgccttcctctgcctcccgagtgctgggattaaagggattaaaggcatatgccaccaacgcccagtctagagagttgttttatgcgtgtgattgctaccattaatttaatctaggttaactataccaagaaactctcctcaacactaaaccttggaggtgttggtttagattactgaattacaacttttaagcccttgcagtacaatgaagctttcccttattcaaaagtattatggcataattcaataagagtaaaatgagtgtatcattcattcatacattacagatttcagcagatgttgaagggttaaatatgagagggaggagaacatggaagggaagtagagtcttctggtgtctctagggcccaaggttcattgggttcatgatcttcagctttcaaactgccaggtcaaggattgaatatgtcttaatctttgacttaattaaaatgtctgttttctgaatcttgccccatggcttgacagtacctgagagccccagtgttcttcagagaactccccagtgtaatggagaatgttcagaggctaaatgggctgttgttactccaagggtatgagagaagcttgttactgtcaaagaggaaagtggtggagatgcctgtttttccgtcatccatggaactagcctgctgataaccacaagttttataagattgttttagtgtcttgaaatatcatgtcttccaatttgcagcactagctaaaataatcccaatctgcctagactttctttagaaggtctattcaatcaatgtttattgttctctgagcactcttggagtgtgttagatctgtttgaatgctgaatcagacgaagttctttaataagggttgcttcccactgctccaggcacaagcagtgccaatgtcctgatggggcaccagcatgagaaactgtatggtaaagttcttggtgaactcttcaccagaacccaaggagcgagatgatcatgaggctgaacatcgtgttctagctcatattcctatgaagaatgaagaaattctaccatttgttcatctgtgccttcaacagaaactacattgtataatcgcccccatgcaaatacagcactacccactggatttataatgataataaaataaatgtatctctagaaaataaagtcattgctataccatacccctaaactgtgtttgtagcccagattacctaagatgctttcccacatattgtaccattcaagattccgatatggcaagttatatagtatctaattagtatagagaataaattgaagcatccctactgagaagtgtgccaaagggaaagaacacatggttttgatcaagttggaattttctatggcactcatgtctttctgccaggcctacaactacatcatgcctatctgagtgtacaacatccagtatcttcattttactcccagtaggaaagagcatctcaggttctggcttcacccacactgacagcaagtgaggattcctcccacatcaccaactgcaaacattcccagttctgtccatcaccccaataaccctgtctacaggctacttatggagaagtgtggtgatatattatttatgatttattaaagcttgcctggggattcagaaagcaaaaccagcctcaagctatagattaggcagtggtgatacacacctttaatcccagcagccagaagctaggaggtggtagtatgcatttttaatcctaggatttaggattaagaggtagatggatctctgtgagtccaaggccacccagatctatacaacattgatccagtcctaaacaaaaacagctcacacaaagatgatctcagcacctgagatcatatgcctttaatcccagcactagagggatataaaagataggaacagggccttcagtagtcaggatcaagcattcattctccagacacattgaggacaggaagacatggaagtctcagtgttctcaagccatgctgaggagaggcagcaagaagtctgaggcttggtgagagctcgtggagacaggatcagccctttcattctgagatagctagtgcctggctgctttgcttttctgatcttcaacttggagtttgaaccccaatatctgtctctgagtcttttatttttcatattacagaaaagtgttatttaggttagggaactgaagctgtggctgaagagctgcctgatcaaatggacagaactagaaaaaaaaaaaaacatcctgagtgaggtaacccaaaaccagaaagataaatatagtatgtactcactcataagaggataccaggcataaagcaaaagatatccagcctacaatccgcaaccccagagacgcttgaaccctcttgcagaaacagatggaagcagatgcagaaatccacaactaaccaatggccaagcccctggagtacaatcaaagtgagggaggaacaaaaatatggacaaaggagtcaagaccatgacaggaaacccacagaatcagctgactggggctagtgagagaatggggaatatgcataagactgaactagactccctgaatataggtgacagcggtgtgactgggacaatatatgaggccactggcagtgggtccaagatctaacactaatgcacaaactgacttagtggagcccattctatatggagacataccttgcccagcctagacacagggatatgggggtgtaaaggtgccttggtcttgcctcaacaagatgatgggacagatttagtagactttctaggggaggtcttaccctctccgaggagcagatgggatggggatggggggttgggagaagaggagggagaaggaaccaggattggaatgtaaaaaataaattaataaaagaaaagaaaaaaagagctgcctatgattctttgtgcatgcccccaaaaccctctggagctcattttccctactgtagaactggtaagctcacctacctcacttgctatagtttagatactgaatgtcccccaatgctccatgtgttgacaacttggtccctaggcattattgggaggttggtgtaacctttgagtggtagggcctgcctagtgagaatgccaggactgggctgcattctaaagtggattatgagatggtcatgtcttccttgcttcctgaacatgggagggtggtttgctctcctgcacacttcccccatgatgctttgccacaggaccaaagccaagggaaccaatcaatcatggaattgaaacctcgaaaactgtgagctgaaacagtgagttatctcaaggattgttacattaatggaaagctggtcacttgttgctgtgatgattaataaaaaattctatacaatgcctgggagttcactaaatgttttaccagcttgctgcagctactctaacaagcccagaattctaaatatcatgcaaaactctttatcctatacatatgtgtatatatacacatatgatatatatgtcattagttattagttactatatatgtgtgtgtgtgtgtgtgtgtgtgtatcattagttattactgtaaaatcaccctacaatttaacggctttaaacagcaagcacttattaacctacccaatttctgagggtcagaaattgagagggcatttctgagtggtttgggaccaggggccatcatgaggtttcaatcaagccacgcttgaaagcttcaatcatttgaagattcaagtgaggctggaagacctactagtgaggaaaagctttcatagggatgttggggaaaaggcttcatttacttcctagtagttgtcaaagacctcatttatccaccacagagaactaagtctactgccttaaactgtctttgttgcatatcagagggactttcctcaaagaagcatgagaaggacatgaagggcacagagaaagactaataatgaaacctttatgaccaagtctctgaagaccaagtttccactctgtttttcattagcaacaagtcactgggggcatccacactgaaaggggtagaaaacatggccctgtttctacgagcatgaataagagatgtgcatccaaaaagaccacctagaatattcagtagtgttcaaaccaccacacccttctcattcattagcaagtgagccgaggaaactacaaagagctataatggggtagttgcaagatgaaaggctccagagcatcatcccctgccctaccagctaccctaggctgggatgggactaagaaattaaatgattttgttaaaccactaagcttcggggtttttgctgtagtaattagtctcccctggctaataacaaaactgtgggcaatagagtacatgagttattccaccaacatttggcaaaaatatggcaagggacataaatattaactgatgactgtatttataaagttaatatgtaggcttgctgccaggcctaatggcctgagttcaaaccccaggacttacatagtggaaagagagcattgaccccaaccccccccccaagttgtcctctgacttctgaatgtaccatgggccatgacatgtacatgcatacacacagacacacagacacacagacacacacacacacacacacacacacacacacacacacacacacacacacacacacaagcgcacacacaactgttttaaaagttaatatgtggagcaagtttttttttaatacaaactttaaggttatactcgtcattgctgcactgggagccccaacttttcctgtctttttcacagagtgctaaagaacagagctcccagtttgcattccttcacttacatcttccagagtcctcgggtcttcaggtcatgctggcctacagatttttgcaccagctgtccaaattctgcattcttagcccctgtatcattcaggaatccatcaaagggttttagtccaattgccttcaaagctctttctcccctgaacctgcaaagaaagaatgctagttcctaaaacaacattgccaataaagagcttttctcccatcgacctatcctgctccattctccacacttgaagtaagagcttgcagaaatattagttatttctaaattgtatttgcaacttttaaactatggttccttaattattggattttttgcaaacttaaaaacctgtctttgctttttttcctttaaaaagaaagtagttcactgttatcaaagcaattgttcaaatgtgtgagaatatagtaccactattcaataaataaagcaagaggttcatctataattccaaagcaaaaagacttaatctttgaggtagatattaacaacaatccaacaaccctattcctctagattctatttgcaatataataagcagtttgttttttaagccatttagtgacagtttattaaaacaatagctagtaatgcagaaattggtacagagacttatatcattagctttggactcagaagtggatggaggtgaggtggtaacaatgaattatttttaaaaagttaggaatgggtcattgaggtgtctctgtgggtaaaagcacttgccaccaagtctaatcatctgagtttgataccagcatccacaagaaggaaggagagaactgaccccccacatgttgtcatctgacctacttatgtgagctatggtgtgtgcatacccctcccccaacacacacacacacacacacacacacacacacacacacacacacacagaaagacatgtaagaaaaaatttcttaaaagttaaaaaaaatatgtatgtgtctacagaaaaagtcacctgtattatgtagatataatcaagtcatcaatagagtaataactcatcttggttatcaggttgacatacatgagaagagggaacctcaactgagaaattgccttcatcagaatggcctacgtatatgcctgtaaagcttttatgtttatgttttgttttgtttcattttgttttgtttgctaattgatgtaacagattctagcccactgtgggcagtaccatccctaggctgaataagaaaagtggctgagtaagcctgtaagcattgttcctccatgatctctgcttcaggtccctgctgtgtcttctttaaataatgaactatccatttgcctgcgaatgtcaagattccattgttttttttctgctgagtagtactccactgtgtaaatgtacaacattttctctatccattcttcagttgaggggcatctaggttgcttccaggttctggctattacaaataatgctgttatgaacatagttgaacatatgtccttgttgtatgaatgtgcattctttgggtatatgcccaagagaggaattgctggatcttgaggtagactgattccaattttgctgagaaactgccatactgatttccaaagtgattgtagaagtttgcactcccaccagcaatggaggagtgttctttctccacatcctctccagcatagactgtcattggtgttattgattttagccattctgacaggagtaagatagtatctcagattggttttgagctgcatttccctgatggctaaggatgctgagcactttctcaagtgtctttcagccattttatattcctctgttgagaattctctatttagttctgcactccactttttaattgcatcatttggtgttgtggtggctagtttcttgagttaattgtatattttggtcatcagccctctgtcagatgtggggttggtgaatatcttttcccattctgtgggctggcattttgtcttgctgactgtgtcctttgccttacagaagcttctcagtttcaggaggtttcatttattaattgttgatctcaatgattgtgctactgatgttatgttcagaaagccgtctcctgtaccaatttgtttgagggtaccacctaccttctcttctaggaggttgagtgtggctgaattgatgttgaggtctttgatccatttggaattaagttttgtacatgatgatagatatggatctatctgcaatcttctacatgtcaacatccagttatgccaacaccatttgttgaagatactttctttcttccattgtatataactttagcttctttgtcaaaaatcaggtgttcctaggtgtgtcagttaatatcagggttttcaattcgattccatttgtctacctgtctatttttgagccaataccaagctgttttcagaactatggctctataataaagcttgaagtcaggatggtgatgcttctggaagttcctttattgtacagggttgttttggctatcctgggtcttttgtttttccatataaagttaagaattgttctttcaaggtctgtgaaggattgtgttgggattttgatgggaattgcattgaatctgtagattgcttttggcaagccatttttactttgttgatcctacctatccaagagtatgggagatctttccattttctggtatcctgagtgaggtaacccagtcacaaaaagataaacatggtatggactcactcatatataatttttaggaatagagcaaagtctacaatccacactgctagaggagtaggaaacaaggagggccccaagagaagattgcatagtcccttgaagaaggggagagggacaagaacccctgaacaccgggcatgtgggtgaagaggaaggaagtgggaagggaagaaggcgatggggaggagaacaagaggactgagacaggggaggaatagagggggacaagaaaggagatgccttgagggagacagtacaggtttggagagaggtctggcacaggggaaatgttaggggatccacagggatgaccctaactaagattccaagcagtggtggagaaaataccagtgatgcccttcccctacaatgagattggtgtctaccttggttaccattcctagagccttcatccagtagctgtttgaagcagaaacaggcacccacagctaagcactgaatccagttgcagagagggaggagggatgagcaaatgagccaagatggtgctggagaaacccacagaaacagttgacctgacctaatgagagcatggagaccctagtcataaacctagggaaacagcattggaccaaaccaagccctctgaatgtgggtgccagctaggaggccaagacagtcgatgggacctctaacagtggaccctgtctttaatcgtagagcactaatggactttgggagcccattccctatggagggatactgtagcagcccagatatagcaaggagggcttaggccctcccccaaatgatatgaaggactttgaaggtcccccatggagggcctcactatccctggggaggagttgggggatgggttggtgggatccatggggaacatgggaggatgggagggtgagagaatggagggatggatatgtaaatatgagtagtaattaaggaatttaaataaaaaaatatagacacaaaatttaaaaaataatgaactatcactctgatatgtaagattgaataagccctttccttcccaagttgtttttggacaaaatgtcttgtcacagcaaccaggatgcaaaccaggacaaatagtaacttggaaaaatagaaatacaacaattatgctttttcaagtttgaattaccaggagattctttgcttttggctatctgtgagcaggtattataaaagagagataaacacaagctagaaccaataaatttgttaccaggagtgaaaggaaacatagcccagaaatgcaggtgcttgctagtctgagaaataatttcccctagccaggttttccaagcagaaaaatgactctaaaattaaggtaactcttggcagcaaagatcaaggacattgccctcaaggtaaagatcaaatgaggagtttgtttgcacatgccttgttagaatgttggaaagaaccgaggcatcttctcagctgcaaaaaaaaaaaaaaaaaaaaaagcttccatagagctgagagctccagtcccacagctgtgcctgaaacagtaataattaaatgtggaaagaaatacccaactcaaaaaagaattgttggtatgacatttgacacacagaatggacttggagcaaatacacagaaactccacaaatatactaagagctgtgttagaaaagcagtgccaacctgagctggggtactgtcccagctcaggttgtgaaaggcctgtagaccccaattttctctgaataaaaaaggggctaatgtttttttctaagtaatttcagcaattgctgtttgggaggtggctaatggagttatggaagcatgtgtctgagaaagaaactaaaacctacagaaaaacaatggacaagcagccatcacagtgggtgatgtacaagaagcttcctaatctaggaatgtccctgtatggttaatcttgattttcaacttgatgcttggtaactctggaatcttttcctgaaggaatatggaggagaggatgaaacacacacacacacacacacacacacacacacacacacacacacacacacacacacacgtgcgctctgccccagggtgggcagcacctaccagcagcagcctggatatgaagaagtctaagaaaaagcagtgttgcttgcctgcctgtcttcacttcttgctggtgaatgtgacagtcaaaagaagtaggggtggcgatggtgaggttaggtggtagtggtggcaatactgctgctgctaacctcagactccagcttcttcaacattccagtgtaggcaggaaaccagtgactctccgtgaatctcccagacctttataacaagatcagtgctgctgaggcatccggttttagatgctgagcagccaccacattctcagcttctccagcgttcagatgcccattattgaagtacccagccactattatgtaagccaattaaatgaatacccttttgtaacactctattctcttctagaaaaccctgtcttgggttcccgtgccctagtcgggggcaactgtcaccagaggtctgctcactggatctgagctcagccggtgggttccagaacacccagagaccaccaaagccctggtaacagtcccacctccatccaccagcccagggatcctaactcagccatggagttccagcacacccagagactgccaaggccccaggaacagtccggcctccatccgggagaagaggacagacatcagagtattggaactgtttgcatctaccagaagggaaccttgatcccatacccaccaggagaggaagagactcctgctacacccaccagaagaaaggatgggaagaagacaatataaaagcacattcaacaatagaaaaaccaatatgacaccaccggagactaggaaccatacaccagaaagaccagaacatcacaatgcagatgaagcagaagggaatgaccttaaaaacattttcatgaaaatgatagaggacctcaaagaggatatgagaaaatcccttaaagaaatggaggaaaaaacaaaccaaaaaatacaagatatcaacaaatctttcaaggaaacacttcaagagctgaaaactgaaatagagacaataaagaaagcacaatctgagggaatgctggaaatagaaaagctggataaacgatcaggaacaacagatgcaagcataaccaacagatggaagagagaatctcaggagttgaagataatactaggagaaacagactcatcaaccaaagaaaatcttaagtccaacaagtccctaacacaaaatatccaggaaatatgggatactgtgaaaagaccaaacctaagaataataggtatagaagaaggtgaagaatcttgaacacaaaggcacagaaaacatattcaacaaaatcatagaagaaaactttcccaacctaaagaaagacctgccaatgaaagtacaagaagcgtacagaacaccaaatagactggaccccaaaaaaagatctccttgcacataataatcaaaacaccaaacatacagaataaagagaaaatattaagagcagcaaaggaaaaagtcaagtaacatataaaggctgtccactctctccatacttcttcaatattgtccttgaagttctagctagaacaataagacaacaaaaggagatcaaggggatacaaatggcaaaggaagaagtcaaactctcactatttgcagatggtatgatagtctatataagtgacctgaaaaactctacactttgctgataaacaccttcagcaaagtggcaggatacaagattaactcaaaaatctgtagccctactatatacagatgatacattcgtggagaaagaaatcagagaaagatcaccctttacaattgccacaaacagaataaaataccttgagataacactaaccaaaaaaagtgaaagacctgtactgtaagaattttgagtctctaaagaaagaaattaaagaagataccagaaaatggaaggatctcccatgttcttggataggtaggatcaacatagtaaaaatggaaatcttgccaaaagcaatgtacagattcaatgaaatccccatcaaaataccaacacaatccttcacagaccttgaaagaacaattctcaactttatatggaaaaacaaaagacccaggatagccaaaacaaccctgtacaataaaggaacttctggaggcatcaccatccctgatttcgagctctattacagagctatagtcctgaaaacagcttggtattagctcaaaaatagacaggtagaccaatggaattgaattgaaaaccctgatattaactgacacacctatgaacacttgatttttgacaaagaagctaaatttatacaatggattaaggaaagcatcttcaacaaatggtgctggcataactggatgctggaatgcagatagatccatgtcacactgcacaaaacttaagtccaaatggattaaaggcctcaatatcaatccagccacactgaacctattagaagacaaagtgggaagtacccttgaattaattggtacaggagaccgcttcctgaatattacaccagtagcacagacaattgtgatcaacaattgacaaatgggaccttctgaaactgagaagcttctgtaaggctaaggacacagtaagacaaaatggcagcccacagactgggaaaagatattcatcaaccccacatctgacagaggactgatttccaaaatttacaaagaactcaagaagcaagtctccaaaacaccaaacaatccaaatacaaa

(The sequence listing continues in the following parts.)